United States Patent Application Publication US 2021/0283215 A1 - sequence listing, part 3

SEQ ID NO: 6701 - DNA, 732 bp, Staphylococcus epidermidis
ttgaaaattattaatttagattcaaaaaatcttgcgtcattttatgtagcatgcgagttgtttaaacaaatacagcagcaccctcatgccaaactcggtttagcaactggtggaactatgactgatgtatatcattacttagtaaatttattaatcaaaaataaagttgatgtgtcgcaggttgaaacatttaatttagatgaatatgtaggtttaaaagcaagtcatcaacaaagttaccatacctacatgaataaagtgctatttgagcaatatcctcattttgttaaaaatcacattcatattcctgatggcttgtcagaaaatctagaagcagaagcggaacgatataacaatttattagatgaaagagggccaattgatattcaaattttaggaattggagaaaatggtcacattggttttaatgaaccagggactgacttcaatagtgaaacacatgtggtgaatttaacagaaagcaccataaaagcaaatagtcgattttttgacaatgaaaaggatgttcctagacaagcagtttcaatgggggtaaaaagtattttaaaagcaaaaaggattatccttctcgcatttggtccaaagaaaaaagaggccataagtaaactgttaaatgaacaggttaccgaagatgtacctgcgaccattttacacacacaccctaatgttgaagtttatgtagacgatgaagcagcgccagattgtttataa

SEQ ID NO: 6702 - DNA, 633 bp, Staphylococcus epidermidis
ttggaactacaattagccattgatttattaaataaagaagaagcagcaaaattagctcaaaaagttgaagaatatgtagatattgttgaaattggtacacctattgtaattaatgaagggttacctgcagttcaacatttaaatgaaaatattaataatgctaaagtattagctgacttgaaaattatggatgcagcagattacgaagtgagccaagcagtaaaatatggtgcagatattgttacaattttaggtgttgctgaagatgcttcaattaaatcagcagttgaagaagcgcataaacatggaaaagcattgcttgttgatatgatagcagtgcaaaacttagaacaacgtgctaaagaactagatgagatgggtgcagactatatcgcagttcatacaggttacgacttacaagctgaaggaaaatctccattagacagcttgcgtacagttaaatctgttatcaaaaactctaaggttgcagtagcaggtggtattaaaccagatactatcaaagatattgttgctgaagatccagatttagttattgttggtggcggtattgcgaatgctgacgatcctgtagaagcagcaaaacaatgtagagcagctattgaaggtaaataa

SEQ ID NO: 6703 - DNA, 549 bp, Staphylococcus epidermidis
atgagtgaatttaataattatcgtcttattcttgaagagttagattctactttatctcaagtagataatacagagtatgaacgttttgctaatgatgttataggtgcagatcgcatatttacagctggtaaaggtcgttcaggttttgtttcaaatagttttgcaatgcgcttaaatcaattaggtaaaaatgcctacgttgtaggtgagtcaacaacaccttcaattaaagaacatgatttgtttattattatttcaggttcaggttctacagaacatttaagattattagctgaaaaagcacaatctgagggtgcaaaaattgtcttattaactacaaatgcggaatcgccaatcggtaatcttgcagagacggttgttgaattgcctgcaggtactaaacatgatgttgagggttcgaaacaaccacttggtagtttatttgaacaggcttcacttatattcttagatagtgttgtattacctttaatggatgcatttcacattagtgaaaaaacaatgcaagagaatcatgctaatttagaataa

SEQ ID NO: 6704 - DNA, 648 bp, Staphylococcus epidermidis
atgaattttgatagttatatttttgattttgatggaacgctaattgatacaacaacatgtcacgtcaaagctacgcaaagcgcttttaaaagattaaatttagatgaacctacagaacaagctattttacatacatatcatttaaatttatataacaattttaaagcgctagcttcacatgaactgtctttttatcaaatagaaaaattaatagatgaatacaatcattgttttagcaacgatgaaatacatcaatcaaaagaatataccggaataagtgaagcattaaaatttttacataaccaaaagaaaaaaatatttgtagtgtctaataaagaaatactaacaactcaaaagtatttagattatctcggattaagccgttttataactgattcattaggtgtctgtattaaaaatgaagacaaacttctttgtgaaacgattcaaaatttgatacagaaacatcatttaatgataggtaaaaccgtgtatataggggacacagcacagaatatcaagagtgcgaatcaagctcatgtgcaaacatgcgctgtcacatggggagcacaatctgcacacgaattgttgcatgaaaatcctcattatattgttaatgatccagaagaatttttaacaattttataa

SEQ ID NO: 6705 - DNA, 1362 bp, Staphylococcus epidermidis
atgaaaaaaataatggaatatttacagcattatattaatcaatacccgcatcgattagctttagtgtttgaagatcgacatctaacgtatggagaattaagtaaagaaatttatcaggctagtatgcgctataaagaagtaaaattaaacaaaaaagtaggtctaatggatgaacatcctgtaaataatattattaactattttgcggtacatcaaagaggtggaattccttgcatttttaatcatcaatggagtaatgaaaggatacatcaacttgtaaaaagttatgacatacaatggttaattaaagataatcatcttacctcaaatcatgataactcaatttataatgatgaggttatcccacgtaatgttatacatataggtttcacgtcaggaactacaggtttacccaaagcgttttatagaaatgaacattcttggatagtttcttttaaggaaaatgagaaattactccagcattgtgaagaaaccattgtagcaccgggtcctttatcacattcactttcattgtacgcatgtatttatgcattaagtactggaaaaacatttataggtcaaaaaaattttaatccactatctcttatgcgtcttattaatcaattgaacaaaacgacagcaatatttgtagtgccaacgatggtacaacaacttatttcaactcaacgacattgttcatcgattaaaagtattttgagtagtggtgctaaacttacattgcaacagtttcaacaaatcagaaatttatatccacaagcaaatttaatagaattttttgggacatctgaagcaagttttataagctacaattttaaccaatcatctcctgctaattctgttggtaaacttttccctcatgtcgagacacgattattaaatcaagatgatgatgcagtaggattattagccgttagaagtgaaatggtgtttagtggttatgttggacaaagcaatcaagagggggcatggattaaaacaggcgacttcgcttatattaaaaatcaacatttgtttttagtaggtagagagagtgatcgtattatagttggggggattaatgtatatccaacagctattgaaagcttaattatggatattgaaggcattgatgaggcccttgtcattggtataccacatgctaaatttggagaaatagcgatattgctttattcaggtaaagtacaattgaattaccgacaaattaaatcttttttaatgaaacatctttcaagacaagaagttccatcaaaattaaagaaaattgaccatatgatttatacagaatcaggaaagattgctagaaaagagatgaaaaataaatttattaatggagagttataa

SEQ ID NO: 6706 - DNA, 1149 bp, Staphylococcus epidermidis
atgaaacaacctgttattattgcagcaaaacgtatagctttcggtaagtatggtggccgattgaagcatttagaacctgaatcattactagaacctctatttaatcattttacagatcagtatccaaaagtaatgtctcttttggatgacgtcattttaggtaatacggtaggtaatgggggaaatttagctagaaaatcattacttgaagcgggattagattttaaaatacctggtataacaattgatcgtcaatgtggctcaggtcttgaagccgttatacaagcctgtaggatggtacaaagtggtgctggaacaatatatattgcaggtggtgttgagagtaccagtagagcaccttggaaaatcaaacgtccgcagtcagtttatgaatctgagtttccacaattttttgaacgggcgccttttgcaagagaaggagaagacccttcaatgattgaagcagccgaaaatgtagcgaagaaatatcatatcagtagaaatgaacaagatgactttgcgtatcgcagtcatcagttggcatcaaaaaatatgaataacggtaatatttcccaagaaattttaccgttcaaagtgaaaggtgaatattttaatcaagatgaaagtattaaacctcaacttactctcagaacacttggcagacttaaaccacttttaaatgaaggaacagtcacagtaggaaatagttgtaagaaaaatgatggtgcagtattactgattgttatggaagaaaatcgggcacgtcaattaggattcacagaagggattaagtttgtgaatagtgcaactgtaggtgttcaaccacagtatttaggagtaggtccagtgccagcagtaaatcaattattagctcaagaacgattaactataaatgatataaatgcagtagaattaaatgaagcatttagctctcaagttattgcgagccaacaacagcttaacattcctttgaataagttgaattgttggggaggagcaattgctacagggcatccatatggtgcaagcggagcagcgttagtcacacgtttattttatatgaaacatcaatttagaactatagcaactatgggaataggtggagggataggaaatgcagctttatttgaaagatggtatggaaattag

SEQ ID NO: 6707 - DNA, 363 bp, Staphylococcus epidermidis
atgcagctttatttgaaagatggtatggaaattagagaagttcaatttacaaatgaagaagttcaaaattattgcgaattgcttaatataaagtatgaccattatgttcctactcttatgtgtgccaagttatggccacaatttgagttatttcaatctttttcaaagaagcctatcatattaaaagagacacacattaagacacaacatcaacttcaagtcgattgtacgtatgaagcgacattgcataaggtttcacaaaaattaattaaaaatatcattaaatatacatatggactcgaaatcaataaagataaaaaacattgtatgtatataaaacaaatatttatcgaggtaagataa

SEQ ID NO: 6708 - DNA, 261 bp, Staphylococcus epidermidis
atgaaatttacaatagaaatggtgaatgaatatttaactatagttaatgatgagaatccgatccatcgttccattgtaccaggacaactcatatgtgaaaaagtattttctgaacttaatgtgaattggatgaattacaaaattaagtacttaaaacctataaatatagatgaagaagtacaatttttaataaaagaaaatgatgaaattgtagtttttaaaacatatgatgataccaaactaacaattactagaagttga

SEQ ID NO: 6709 - DNA, 156 bp, Staphylococcus epidermidis
atgtataaagactataacatgactcaacatactctactaatggaaacttcagttcttatccctacgaatgatatttcacgacatgtaaatgatattgcagaaacaattcccgagactgaattcgataaattcagacattatcgttgcttaatataa

SEQ ID NO: 6710 - DNA, 177 bp, Staphylococcus epidermidis
atgtttaccatatcaatcatcgctatgattattggtgttgtgcttattgttttaagtcaaattatctatcattcaaaaccgatagatgctaaggaaaaaatgtttatacccggcgtatgcctttttttagtaggactcttaagtttaatcggtcactttgttaatggctacgtataa

SEQ ID NO: 6711 - DNA, 429 bp, Staphylococcus epidermidis
atggcaaattctatttactcaactacaatgatttcaaatggtggacgtgatggtcgcgtttttagtccagataatacatttgttcaaaaccttgcaacacctaaggaaatgggtggtcaaggaggcaacgatactaatcctgaacaattatttgctgctggatatagtgcatgctttaatagcgcgctatcattaatcttatctcaaaataaaataagtgatgccaacccagaagttgaaatcactattgaattacttaaagatgatactgacaatggttttaaacttggcgcagatattaaagtcacacttgaaaatatgtcccaacaagatgctgagaaatttgtggagcaagcacatcaattctgtccatactcaaaagcgacacgtggtaacattgacgttcagttagatgttacagcgcaataa

SEQ ID NO: 6712 - DNA, 2031 bp, Staphylococcus epidermidis
atgaagagaacagataaaattggtgtctacctcaagctgtcatgttctgcgttgttacttagtggttcgctggttggttatggcttcacaaaagatgcttttgcagattcagaaagtacatcatcaaatgttgaaaatacttctaatagtaactccatcgctgacaaaatccaacaagctaaagatgatattaaagatttgaaagaactttctgacgcagatatcaaaagttttgaagaacgtttagataaagtcgataatcaatcaagtattgaccgtattataaatgatgcaaaagataaaaataatcatttaaaatcgacagactctagtgccacatcatcaaaaactgaagatgacgatacatctgaaaaagataatgatgatatgactaaagacttagataaaatactgtcggatttagattcaattgctaaaaatgttgataaccgtcaacaaggtgaaaatagtgcttctaaacctagtgactcaacaaccgatgaaaaagatgattcaaataataaagtacacgatacaaatgctagtacacgcaatgcaactactgatgattctgaagagtcggttattgataaattagataaaatccaacaagattttaagtctgactctaataataagctttctgaacaaagcgatcagcaagcatcaccatctaataaaaacgaaaataacaaagaagaatctagtacgacaacaaatcaatccgatagtgatagtaaagacgataaaagtaatgatggtcgtcgctcaacattagaacgtatagcatcagatactgatcaaattagggattcaaaagatcaacatgtcacagatgaaaaacaagatatacaagcaattacacgttcactacaaggtagtgataagattgaaaaagcacttgctaaggtacaatctgacaatcaatcactagattctaattatataaataataaattaatgaatttaagatcactagatacaaaagtagaggataataacactttatctgatgataagaaacaagcgcttaaacaagaaattgataagactaagcaaagtattgaccgacaaagaaatattattatagatcaactcaatggtgctagtaataaaaaacaagcaaccgaagatatcttaaatagtgttttcagcaaaaatgaagtagaagacataatgaaacgtattaaaacaaatggccgaagtaatgaagatattgctaatcaaattgccaagcaaattgatggtcttgcattaacttctagtgatgatattttaaaatcaatgttagatcaatctaaagataaagaaagtttaattaaacaattgttgacgacacgacttggtaatgatgaagcagatcgtattgctaaaaaattgttaagtcaaaacttgtcgaattctcaaatcgtagaacaattaaaacgtcatttcaatagtcaaggaacagctacagctgatgatatattgaatggtgtgattaatgatgctaaagacaaaagacaagcgattgaaacaatattacaaacccgtatcaataaagacaaagctaaaattatcgctgatgttattgcgcgtgtacaaaaggacaaatcagatatcatggatctcattcactctgcgattgaaggcaaggcaaatgatttattagatatagaaaaacgagcaaaacaagctaagaaagatttagaatatattttagatcctataaagaatagaccatccttgttagatcgtattaacaaaggtgtcggtgattctaattcaatatttgatagaccaagtttacttgataaacttcactcaagaggatctattcttgataaattagatcattcggcaccggagaatggattatctttagataataaaggtggccttttaagtgatctatttgacgacgatggtaatatctcattaccagcgacaggtgaagtcatcaaacaacattggataccagtggctgttgtactcatgtcattaggtggagcgctcatctttatggcgcgtagaaaaaaacaccaaaattaa

SEQ ID NO: 6713 - DNA, 1968 bp, Staphylococcus epidermidis
atgaagaaaaataaatttttagtatatttactatcgacggcgcttatcacgccaaccttcgctacacaaacagcttttgctgaagattcatctaataaaaatacaaattcagataaaatggaacaacatcaatcacaaaaagaaacatcaaaacaatctgaaaaagatgaatttaacaacgatgattctaaacacgattctgatgataaaaaaagcacttctgacagcaaggacaaagactctaataaaccattatcagctgactcaacacatcgtaactataaaatgaaagatgataatttagttgatcaactttatgataattttaagtctcagtcagtagatttttctaaatactgggaaccgaataaatacgaagacagttttagtttaacgtcactcatacaaaatttatttgattttgattctgatataacagattacgaacagccacaaaagacaagccattcttctaatgacgaaaaagatcaagtagaccaagcagatcaggcaaaacaaccatcacaacatcaagaaccatcacagtcgtctgctaaacaagatcaagaatcatcaaacgatgaaaaagaaaagacaactaaccatcaagccgattctgacgtcagtgatttacttggagaaatggataaagaagatcaagaaggcgaaaacgtagatacaaacaaaaatcaatcttcttctgagcaacaacaaactcaagcgaatgatgatagctcagaacgtaacaagaaatattctagtattacagattcagcattagactctatattagatgaatatagtcaggacgctaagaaaacagaaaaagattacaataagagcaagaatacaagtcacactaaaacatctcaaagtgataatgccgacaagaatccacaattaccaacagatgatgaattaaaacatcaatcaaaacctgcacaatcatttgaggatgacattaaacgctcaaatacacgttcaacaagtcttttccaacaactacctgaattagacaatggtgacttatcttctgattcatttaatgttgttgacagtcaagacacacgtgatttcattcaatcaattgctaaagatgcgcatcagattggaaaagaccaagatatatatgcatcagttatgattgctcaagctattttagaatctgactctggaaaaagttcacttgcacaatcaccaaatcataacttgtttggaatcaaaggtgactacaaaggacaatctgtaacttttaatactttagaagctgatagcagtaatcatatgttcagtatccaagcaggtttccgtaaatacccaagtactaaacaatctcttgaagattatgcagatttaatcaaacatggtatcgatggtaatccgtcaatttataaaccaacttggaagagtgaagctctatcatataaagatgctacttcacatctgtcacgctcatacgccacagatcctaattattctaaaaaattaaatagtattattaaacattatcatttaacatcttttgacaaagaaaaaatgcctaacatgaagaactacaacaaatcaataggtacggatgtctctggtaatgacttcaaaccatttactgaaacttccggtacatcaccttacccacaaggccaatgtacttggtatgtgtaccaccgtatgaatcaatttgatgcatccatttctggtgacttaggtgatgctcataattggaataatcgtgctgaaagtgaaggctatacggtaacgcacacacctaaaaatcatactgcagttgtgtttgaagctggacaattaggtgctgatacacagtatggtcatgttgctttcgttgaaaaagttaatgacgacggttcaattgttatttctgaatcaaatgttaaaggattaggtgtcatttcattcagaactattgatgcagaagatgctcaagatttagattacattaaaggtaaatag

SEQ ID NO: 6714 - DNA, 2859 bp, Staphylococcus epidermidis
atgaaaaacgcactaaaactttttatcacggatttaaaaagagttgctaaaacaccaggtgtatgggtcatcttagctggtttagcaattcttccttcattctatgcatggtttaacctctgggctatgtgggatccgtatggtcatacaggacatatcaaagttgccgtagtgaatgaagaccaaggtgaaaaagttcgtggtaagaatattaatgtaggaaataaaatggtcaaaactttaaaaaagaatgatagttttgactggcaatttgtgagtagagaaaaagccggccatgaaattaagatgggaaaatattatgcaggtatttatataccgaagaaattcacacatgaaatcactggtactttaagaaaacatcctcaaaaggcggatatagattttaaagtaaatcagaagattaatgctgtagcagctaagttaaccgatacgggatcgtcgtttgtgattgataaagcaaataaacaatttaacaaaaccgtagcaaccgctttactttctgaagctaataaagtcggactatcaattgaagataatgtacctacaatcaataaaattaagagtgctgtatatcaagctaataattcattgcctaaaattaatcaatttgcagacaagattattgaactaaataaacatcaagacgatttggatgcttatgctaatcaatttagaagtttaggaaagtataaagggaatgtattagacgctcaagaaaaacttaatgctgttaattcgtctattccggcgcttaatgaaagggctaaattgatacttgcacttgatagctacatgcctaatattgaaagaattttaaatgttgctgctaatgatgttccagcacaatttcctagaattaataggggtgtcgatattgcaagtgaaggtattgatgcagcgagtggtcagttaaatgatgcaaaaggttatttgactcaagctaaagcgagagtgggagactatcaagaagcagctggccgcgctcaagatgtgaacaaccaagcaaatcaaaatctaagaaatcaaacatcaactacaccccaaagcgctataaaatcatcgcattcggaagggaagagtcattcaagcattaaaacagtacctgtgagtcaatcaggtgagaatcaacccgtttatggtgataacattttatctaacagtgatgtaaaatcaatgaatacagctttaacagaagctttattatcattatctaatcaaacagatcaacaagcacaagctacccaacaagacattaagtcattaaaaaatatagcatatggcgtcatcgcttcagataaaccatcagagtttaaagaaccattaaaaaatataaaatcacgcttagaaaacgcatctaagtataatcaacaatttatagatatcttgtcagagttggaaaaaagtgaacatgttgatctatctaatgaaattaagcaagtgaaagaagcaaacaatagcattaatgataatttaaaaagtaccaatcaattaatagatgcattgtcaaatggtagctccggacaattagaagcagtcaatgtattacgtgacttacctaacttaaataaaaggttagatacattacgaaattacattaaaaaagaacttaatcgtaatttactagctgtttctaatgagattactgatcaacttaataaaggtcaaaatacattatcgacaatccaatctaaattaaatactattaaccgagtgattaacactggtcaagatattttaaatagcggtaaaaagagaattgatacgattcaaactgcattgccagcaatcgaaaacgcatatataaatgcaatgcgaactgcacaagcttacttcccaacagctaaaaaagatgtcgcgaaagctgcagactttgtacgtaatgacttgcctggattagagagagaattagctaatgtaacacagtctgtaaaccaaaaaataccatctttatttagtcgttatgataatgctgtagatttattaaacgagaaacagcctcaagcaaaagaagcacttgcttcgcttgccgatttctcagaaaataaattgccagatgttgagaaagacttgaaaaaagcaaataaaatcttcaaaaagttagataaagatgatgctgtagataagctaatagatacattgaaaaatgatttgaagaaacaggcagatattgttgctaaccctattaataaaaaaacgacagatgtgttcccagtaaaagactatggttctggtatgacgccgttctatactgcattgtctatttgggttggaggattattaatggtcagcttattatctgtagataacaaacatgaacacttacaacctattatgacgaagagacaagtgtatcttggtaaatctggtttctttttcttattaggtatcatacaggcattaatagtatctatcggtgatttagttatccttaaagcatcgatagaatcaccgatattatttgtctctattgccgtgtttagttctctcgtatttaactcgattatttacacatctgtatcattgttaggtaaccctggtaaggctgttgctattatcttacttgtgttacaaattgctggtggaggaggtacattcccaattcaaacaacgccagaattcttccaagcgatatctccatatttaccattcacgtattctatcgacgcattacgtgaaacagttggaggtatagttccagagatactgattacgaaagtgatcattttaggtttattcggaatcggattcatggttgtaggttattgcttgaaacctgtgactgaccctattatccgtaaaattgctgaaaaagctgatgaaagtaaagtaactgaataa

SEQ ID NO: 6715 - DNA, 951 bp, Staphylococcus epidermidis
atggtactttttcttcaacccgtatttcaagaacgtttatggggtggcaccaatctcactcaatttggctacgatattccgaataattctaccggcgaatgctgggcaatttccgcacataaaaacggtcctaacacaattcttaacggaaaacataaggggaaatctttaaaacaagtttgggacgaagataaagcacttttcggaaatgactcacgtaaagattttccacttctcactaaaattttagatgcacatgatcgtttgtcagtacaagtacatcctgatgatgaatatgcgcttaaacatgaaggcgaatacggtaaaactgaatgttggtatattttagacgctcaacctggtgctgaaattatctatggtgttaatgctacaagtaaaaatgaacttgaacatatgattgatcatcatcaattcgactatttatttaaacatgtacctgttaaaccgggtgatttcttttatgtaccagccggtacagttcatgctattggttccggaatcctcattttggaaactcaacaatcttcagatacaacatatcgtatatacgattatgaccgaaaagataaaaatggtcatacgcgtgaattacatttaaaccaaagtaaagatgttattgatatcactacaactgaacctaatacaacacctaagactgaaatgataaatggcaattgtcacactcaatttgttgccaatcatttctttacggttgaagaatggtctatcaaagacatattagattttcaaaaaccacacacttattgtttagtgtcaatgattaacggccacggacaagtttcaatcaataacaaagtatataaaatcggcaagggcaatcattttattttaacttctgaagatcaatatattaaatttgttggtaatatggatttaatagtcagttttagtaaagatgaggcatattaa

SEQ ID NO: 6716 - DNA, 1941 bp, Staphylococcus epidermidis
atgaaaatacttgcaattacatcatgtccaaatggaattgctcatacatatatggctcaagaaaaattagaacaagcagcaaaagatatgggcgttgatattaaggttgaaactcaaggaggcgtcggagcagaaaatgtgctcacttctaaagaaatcaaagaagctgatggaatcatcattgctgccgatagacaggtagatttatcaaggtttaatggtaaacctctcatcaatgaaagtgtacgtgaaggtattcatagacccaaggaattaatacaacgtgtgattgaccaagatgcacaaatttaccatgatcaaaatatttcttcaaatatgtctagagaccaggaagaacctcataaaagtaatattcaaatggtatatcagcatttaatgaatggtgtttccttcatggttccatttatcgtcgttggcggtttactcatagctattgccttaactcttggaggacacaccactccaaaaggattagttatcaccgaagattcattttggaaatctattgaaaatattggtagtttatcgtttaaattcatggttcccatccttgctggttatatcgcggtgagtattgctgataagcctggtcttgttccaggtatgattggtggtgccattgctgctgatggtagtttatatggaagtgaagcaggagccggtttccttggtggtatcgtcgcaggtttcttagcgggctatattgcaaaatggattaaacagattaaagttcctaaagctatggctcctattatgcctattattattatacctattctatcttctttaatagttggtctcatttttatatttgtaataggcgcaccaatttcaaatatatttggtgcattaacatcatggttaaaaggaatgcaaggtgctaacatcattattcttgctcttattattggcgcgatgattgcttttgatatgggaggtccagtaaacaaagtagcattcttattcggttctgcattaattgctgaaggcaactacactgtgatgggaatggttgctgtagcagtatgtacaccaccgattggtttaggtttagctacatttgttcgtaaacaccaattcaataaagcagaacaagaaatgggtaaggcatcatttacgatgggattatttggtattactgaaggggcaatcccttttgctgcacaagatcctctaagaatcattccagccaatatgattggcgcgatgattgcttcagtaatagcggcggttggaggtgtcggtgataaagttgctcatggaggtcctattgtcgctgtactaggtggaataagtaatattttatggttctttatagctgttgtcgttggaagcttagtaaccatgttcacagtcttgttatttaagcgtcacacccctgctatagcaaaaagcaataatggaaatgatacttctgttggaactgacaatgtattttctgatgaccaatctattaatcatagcaaacaaccctcacatcatatggtgttcgataaatcactcattgaaattaccaaggaaccaatgacaagagatcaagctattgatagattacttacaaagttatgccatcgtcattacattacgaatatagaagaggtaagaaccgcaatccttaaacgagaggctgagtcaacaactgctatcggaatgaacgttgcaataccacatgctaaatctcatgcagttaaacgtcctatcgtcgctgtattaaatcataaaacaggtgtagagtgggaaagtctagatgaatcaaatcctcagctcatttttcttattgcagttcccaatgataataacgatacacatttaaaactgctacaacggttatcacgaacgctcatgaaagataatacgcgtgatgagttaattcatgctcaaagtcgtgatgaaatatttaatattttaaaagagatataa

SEQ ID NO: 6717 - DNA, 1872 bp, Staphylococcus epidermidis
gtgattgatagacaaatcaaactcatcaaattgttattaaattatacagatacgtatataagtggccatgatattgccaaacagttaaatgtatctaatagaactatacgtaatgatattaaaactatacatactacatttttaaatgaattaattttaagtgtacaatctaaaggttatatgctaaatacatgtctttatacacctgatgagatacaatctgctttagagtcagttattgtaaaagagaataaattgcttatcacaattgcttataggttatttatggaaaagcatacattcactatcaaagagctatcttcaacttaccatttaacaaaatcaaaagtgattgattatgtaacacgtatacaaacgtgggctataaaatttgatatttatttatcaattaaaaagaagcaaggtatcatgatcgatgcgagtacaacgagtatcagtaatgctgtacttcatatcaatcaacttacagacgatgactttaaagttgaaaaccttattttacaagagttacctcaagcccatactagaaaaataaaacaaattatctcaaagcatatagataatcatcaattatcaacttctgaaaataaaatacaacaattacttgtgcatctaattttaattatcaaacattctcaaccagaggaagaagattggagcactgatacagaatctttaactattgcgaaaaagtgtataaaagatatcaatgaaacccttggatatcaacttaacaataaaacaagtgaatgcttttccttttttattagctaccatttcaataagtttgatttagggatccaacaactatttattcaaagttatatcgatcgactcattgaattaatggagcaacatattggttttcccttttcacaagatacaattttaaaagataatatgaacgtccactttagtcgtacatatttgcgattaatgcgtcatgtttatctaaataatccattaacaagtcaaatcaaacgactatatccctttgtctttaatacactatatgatagtattcgacaattatcacaagataccaatatccaattaagcgaagatgagattgcctttttaactatacattttcagtcttctatcgaacgccataagtcatcacatattcatgttgtaattgcttgttattatggcttaggcatttcaacgttgcttgctgagaaaatcaaacaacttaatcatgcaatacagatcgtagatacattaaaacttgaagatattaaaaactatcattttgaagggattgacttattaattactactcacgactttgatacaagtcaacttttacaaatacctaaagtcatacaagtatcacctttattttcagatgaagatgctaaaaaaatagaattctttgtaaaagccatgcaaaacccattatcaaaagatgatatattatcaaaaattcagttgagtgttgagtccaatttcaaactgaatcattcaaatcacattcttccaatttttgagaaatccaaagaaattttagattatcatcatgcaactctagatggctatatagaaagtgccatagatcgcgaaaaacaatcttcaacatatataggtaaagggatagcactcccacacggcaaccctgaaaaagtactgaaatcacacatgattatatttaaaccttctcaacctataacatggaaacaacatgaagttaaacttgttttctttttagcaatgagtaaaaaagatttaaatattaaccgtaaaattatacaaacaattgctcaattagaagaagatgacatccatcaattatgtcttttagatgatttacaactaaaaaacactttgtatgcacgttttaaagaataa

SEQ ID NO: 6718 - DNA, 135 bp, Staphylococcus epidermidis; identical to SEQ ID NO: 3750

SEQ ID NO: 6719 - DNA, 780 bp, Staphylococcus epidermidis
ttgagtaactcaaaaaaagtagccgttgtcacaggtgcagcacaaggtattggcttgaaaattgctgagcgtctatttgaagatggatatagcatcgcgcttgtagactttaatgaagcggtagctaaagagtcagctgaaaaattatcaaaagaagggcaagaggcagttgcttttaaagcagacgtttcaaatcgcgatcaagtatttagtgtgttaaatcaagtcgttgaacactttggcgatttaaatgtcctagttaataatgctggtcttggaccaatgacaccaattgaatcagtaacacctgaacaatttaatcaagttgtaggtgttaacgtaggtggtgtattctggggtatccaagctgcaattgaacaatttgataaattaggacatggcggtaaaattatcaatgccacatctcaagcaggtgttgaaggtaatgctggcttatctctatatagcagtactaagtttgctgttagaggattgactcaagtagcagcacgtgatttagctgagaaaaatattacagtcaacgcattcgcacctggtattgttgaaacaccaatgatgaaaggtatcgctgaaaagcttgctgaggaaaataaccaaccaatggaatggggttggaaacaatttacagatcaaattgccttaaaacgcttatctaaacctgaagatgtagctaatgtagtaagcttcttagcaggtagcgattcagattatattactggccaaacaatcatcgttgacggtggtatgagattccactaa

SEQ ID NO: 6720 - DNA, 2094 bp, Staphylococcus epidermidis
atgagtaaaatcaatgatagagatattgctgaattaaatagcttttgggcttatcaaaatacaaataaactgaaaacattttcagtaaatgacaagaattttaagcaagttggagggtatgaagataataaaaatcaaaatattaatggtgcagcagatatcaaagtttacgagttattagataattacggtataccttcgggtgaacaatttatagtatttcagggcactgataatgatgaaactataaatcctaataatccactaaaaggtaaactagcagatgattggctgcaaaatataaaattaatgaacaataataataaaagtactgatttaattaaacaaaatcagagttttataaataaatataataaaaaaataaatgacgctaaaaaattaaattctgataaattttatataaaatacggagaagaaagagaacgatttaaagataaaaaaatagttaatagtggtggaaattctcaaggagcagttggtgctaaattagcaggtgttaaaaatcctaatttaaaagtagttacgactgatcctgcaaccttacctgaagcgtcttggagaggtactaaatctaaaaaacataataatattataaattatcatagcacttatgatatattgtcttgggttcaagatccggtatttaaaaataatcccgggaaacgtgtagaccttaaaaccggtgttcctactcttgaaagtcttgctgatagtcatttaggttataaaagaaaatttaatgaaaatgataacacttacaaagatatacctgttaaaaagataaaatctgttaaggatacggatactaaaaaaggcaaatcaaaacctaaaacgattgatattactttagacatggacggccgaatcccaataaatgtctggacaggagaatctatttctcgttctggtactggcacattaattaaattagatattgaaaagttagaaaatctccataatttagtaactggtgaaacaagtaaaatgttatctgaatgtgttaaatttctaaatgaaagctttaatatatctcaacatgaaaacaataactttagtaatcgtaagcataaacttaaaagtgatttcattgataaaatatgccttgattccttggaaaacttatgtaattccataaaacacaaacgacagtcttttgaagaagcgattgatcaagtacacaaagttatcgatcctataattggcttaataccttctataggtcttaaatcacttgaagaatatatttctgaaatagtccgtaatttagaaaagggtatcgaagcaattcacgatacacttgaagcaaaaatccaaaaaatctttcaaaatttggataatgattttcacgatggtgtggctgaagaaatgatgaagcatcttcaagtggtatctagaaatattttacaagtaaaacaacaaaatgatatttatggtcggcaaatagcagatattaaaaatatcatggctcaacaagatgccactataatggatggtaatactaatataagctatagtggtgaaaatatggtttacggttcaatcgaatcttccaattacttaactcgtaaaatgtcaattttaaaagatcatattgataagggcataaaagatttagcagaatatgtagaagagttatataacgagtatttcaaacctgttaaggatgatatcgataaaacagttactgcacttacaaatgcgaaatttagtatatattctattaaaacaatgttgaaaaacccagctattattactgcattgaaagcctctccatttagtccttcaatggtaatttctgcacttgaaagattagtaggtgaaatagataagtgggtatctctattaaatgatttgaaagttgcgtcgcctattctcgaaaatcacttagatgatattatagaaaatgcgaaacctacgattgttaatatgatttttgaaccaagtcattatgacgatatgtttattttaaatactcaagctcaagcgcgtttagatcaaatggctcaacaatttgaagtagtgtgtaatgggttgaatgaaaatgctgggcaagccatcaatcagcatcagtga

SEQ ID NO: 6721 - DNA, 855 bp, Staphylococcus epidermidis
gtgcataaagaagcaaaacattcatcacaatcaattcctgaagaagttcccgcaagtcaatacaaaggtcaaggtttccaaccagtagctgaaaaaagtgctatcgcacatgcgaaaaaacatcgtgaagaatacgaaaaacttggcgaacaattttttaaagataattttagccttaatgttaaagccacaaatgttgtaggaagtggtgatggcgtcgaagtctacgttcattgcgatgatcatgacattgtgtttaatgcaagcatcccttttgataaggaagcaatacatgaagaaggctccatgcgaagcaatgataacggagataccatgagtaatatggttggaacggtgttaagtggttttgaatataaagtacaaaaagaaaaatatgataacttaacaaagttctttaaagacaatgaagaaaaatatcaatataccggttttactaaagaagcaatacataagacacagaatgttggatatcaaaatgagtattattatttagcaggtaacgttactaatattaataattatagaaaatattatgaacctttaataaaaaaagattctaagaatttcaaagaaggcatgaaaaaagcaaatgaagcaacaaatttcaaagccaaaattgaagttgtttcaacattattcagtactaaatctgatttcactaaaaataactctaagaaagatttattattcttaagtgatgatttatatcattacaaagaaaaacctgaaaacacaaacataactttacaattaagtgagccaaaaattaattctacacgcgcattttatgatgctaacaacccattagaatatggagtgcataaacatgagtaa

SEQ ID NO: 6722 - DNA, 501 bp, Staphylococcus epidermidis
ttgaaaaaatttttagctacaatagtggtaatcattcttatatgtgcattaggcttttcattatatgcagctattaaccaccatactaattctaataagaatgataaaaaaatagaacacaatcgcaaaaacaaacaaaatgatacttcaaatcaaaatcgtgatactaatcaacaccaagaccaaactcaaccaacaaataatgactataacaacgataatcaatcaggtactgaacaaccagcacaacaacctaactaccatcaatacccaaataataatcaacagtctggttcaaataaaaataactcttcagaaaataacaaacagaaaccgaatcagaacaaaactaatcaatcatatcatcaaccagcacaatcaacaccacaacagtcgtcacaacataataatcaatctgattcacaacaaaatggcaactcaaataataattccaacaatcaaaatcatggaacaaatgataaacagaataaaaatcgttaa

SEQ ID NO: 6723 - DNA, 1245 bp, Staphylococcus epidermidis
atgagcgtattatctaatgaagaaagagttaaaatcttatccgatatagtctcaataaaaactgtaaatagcaatgaattagaggttgcacattattttgaaagactatttagtcagtatggaattcgttcacatattgatacagttacagatggtcgagcaaatttaatagcaactgttggttcaagtcaaccagttataggaatatctggtcatatggatgtagtatctgaggggaatcatgatgattggacgtatgatccttttacactcacagagaatcaaggatatttatatggtagaggtgctgcggatatgaaatctggattagcagctttagccattgctcttattgaaattaaagaaagtggtaagttaacacagggaactattaaattcatggcaacagtgggtgaagaaatggaacaatcaggttcgcaacagttgtttgaaaaaggatatgctgatgatttagatgccttactcatagcagaaccatcattccctagtttggtgtatgcacataaaggctcaatggattttagaattaaatctaagggacgtgcatcacacagttcaataccatttttaggacaaaatgctattaaaccattactagagtttattcaaaatataaatcaagaatatgaaaaaataatgcaaacagtaaaaggtgagtccttagatttttcaaatatgattaataaattagagaatcaattacctagccatataacaaaagaaaaagcacaagagcttatacagggacttgttatgaccaatagtaccgttcaaggtggcacacaagtaaattcagtaccagattttgctacagctgaatttaatgtacgcacaataccagaatataataataacaaagtaaaagcgctatttaataaatatgtagagcaagcaaatcacaatggtgctagtttgactcaagaactttatcttgatttagaacctgtagtaacaacaggtcaaaatcgcttggtagagctaggatttgatattgcaaaaagccatttttctaacgaaagagatttaatcattactcctactgtagcagttactgatgcttccaacttattaaaaggaaaagatgaaaattttccatttttaatgtttggcccgggaaatggacctcatcaaataaatgagtgcgtagaaaaagccaattatttagaatttgtggaatactatatagagtttatcacttcatatttaaatgaagagaatgagtaa

SEQ ID NO: 6724 - DNA, 1524 bp, Staphylococcus epidermidis
atgaagaatttttctaaattcgcacttacaagtattgccgcattaactgtggcaagtcctttagtcaatacggaggttgacgctaaggataaagtatcagcaactcaaaacatcgatgcgaaagtaacccaagaatctcaagcaactaacgcattgaaagagttaccaaaatctgaaaatataaaaaagcattacaaagattataaggtcactgatactgaaaaagataacaaaggatttacgcattacacattgcaaccgaaagtgggcaacacgtatgcaccagacaaagaagtaaaagttcatacgaataaagagggtaaggtagttcttgtcaatggtgatactgatgctaagaaagttcaacctacgaataaggtagcgataagtaaagaaagtgccacagataaagctttcgaagcaataaaaattgaccgtcaaaaagctaaaaacttaaaaagtgatgtcatcaaaaccaataaagttgagattgatggagaaaaaaataaatatgtttataacatagaaattattacaacttcaccaaaaatctctcattggaatgtgaaaattgacgctgaaactggtcaagtggttgataaattaaatatgatcaaagaagcagctactacaggtacaggtaaaggtgtactaggtgacacgaaacaaattaatattaatagtgtcagcggtggttatgcactacaagatttaactcaacaaggtacactttcagcttacaattacgatgcgaatactggtcaagcttacttaatgcaagataaagataaaaattttgttgatgatgaacaacgtgcaggtgtagatgcaaattattatgctaaagaaacgtatgactattataaaaatactttcggccgagaatcatatgataatcaaggtagcccaattatttcaatcgcacatgtaaataacttccaaggtcaagataacagaaacaatgcagcttggattggtgataaaatgatttacggtgacggtgatggacgtacatttacagcgttgtctggtgcaaatgatgttgttgcacatgaaattacacatggtgtaacacagcaaactgctaatcttgtttaccgttctcaatcaggtgcattaaatgaaagtttttcagatgtatttggttacttcattgatgatgaagatttcttaatgggtgaagatgtttacacacctggtgtaggcggagatgccttaagaagtatgtctaatccagagcgttttggacaaccatctcatatgaatgattttgtttatacaaattctgacaacggaggcgtacatacgaattcaggtattccgaacaaagcagcttacaacacaattcgtagtattggtaaacaacgttctgaacaaatttattatagagcgttaactgtttatttaacttcaaattctgatttccaagatgccaaagcatcattacaacaagcagcatttgatttatatggcgacggtattgctcaacaagtaggtcaagcatgggacagtgttggcgtgtag

SEQ ID NO: 6725 - DNA, 462 bp, Staphylococcus epidermidis; identical to SEQ ID NO: 3757

SEQ ID NO: 6726 - DNA, 1236 bp, Staphylococcus epidermidis
atgacaaatggacctattcaagttaacagtgaaatcggcaaattaaagacggtattacttaaaagaccagggaaggaattagaaaacttagtgcctgattacttagatggattattgtttgatgatattccatttttaaaggtagctcaacaagagcatgatcattttgctcaagttcttcaagatgaaggaatagaagtgctttatttagaaaaattagcagcacaaagtatagaagattcaaatgtcagagagcaatttatagatgacgttttagcagaatctagaaaaactatcctaggtcatgaaaaagaaataaaaaaactcttttcaactttgtcaaatcaagcattaattaataagattatggctggcgtacgcaaagaagaaatacaacttgaatcgacacatcttgtagagtacatggatgataaatatccgttttatcttgacccaatgcctaatctatatttcacacgtgatcctcaagcttcaattggtagaggtatgacagtaaatcgtattttttggagagcgagacgcagagaatcgattttcatttcatatattttaaaacatcatcctagatttaaagatgagaatattcctttatgggtggatcgtgactgtccgttcaacatcgaaggtggagacgaactggtgttatctaaagatgtacttgcaatagggatatctgaacgtacttctgcacaagcaattgaacgtttagcacgacgtatttttaaagatccgttatctacttttaaaaaggtggtggcgattgagattccaactagtcgaacatttatgcacttagatactgtttgtacaatgattgattacgacaaattcactacacattcagcaattcttaaatcagaaggaaacatgaatatctttattatcgaatatgatgataaagctgaagatatcaaaatccaacattctagtcatcttaaacaaacattagaagaagtgctcgatgttgatgaaatcacattaataccaactggaaatggtgatatcatcgacggtgctcgtgaacaatggaatgatggttcgaatactttatgcatacgtcccggtgtggttgtaacttatgatcgtaattatgtttctaatcaattgttacgtgagcgtggtatcaaagttattgaaattcctggaagtgaacttgtacgtggtcgaggaggccctcgatgtatgagtcaacctttaataagagaagatctatag

SEQ ID NO: 6727 - DNA, 1008 bp, Staphylococcus epidermidis
atgaaaaacatcaagaaaccctttgatttaaaaggtaagtcattgctaaaagagtatgatcttacaggtgaagaatttgaaggtctaatcgattttgctatgacattaaaaaaatataaacaacaaggcacaccacatcgatatttagagggtaagaatattgctttactcttcgaaaagacatctactcggacgcgtgtcgcatttacagttgcatctattgatctaggtgcacaccctgaatttttagggaaaaatgatattcaattaggaaaaaaagaatctgttgaggatactgctaaagttttaggcagaatgtttgatggaattgaatttagaggtttttcccaaaaaactgttgaacaattggccgaattctctggagtaccagtatggaatgggttaactgatgattggcatcctacacaaatgttagctgattatatgacaattaaagaaaattttggatatttaaaaggcatcaacctaacttatgtaggaaacggacgtaataatgttgcacattcgcttatggtggcgggtgcgatgcttggtgtaaatgtacgtatttgtacaccctcatcattaacaccgagagatgtatattttaatattgctaaagatcaagcgtctaattatggaggttcagttaagataactgataacattcatactgccgtcaaagatgcagatgttatttatactgatgtttgggtatcaatgggtgaagaaagtgaattcgaaacacgtattcatttattgaaagactatcaagttaatagaaaaatgcttaatttaaccggtaaagtagatacgatatttttacattgtttaccagcttttcatgatacacaaacagaatatggacaggatatttttaaaaaatatggcttaactgaaatggaagtgacagacgaaatctttagaagtgagcattctagagtttttgatcaagctgaaaatcgaatgcatacgattaaagccgtgatggcagcaactttaggctag

SEQ ID NO: 6728 - DNA, 141 bp, Staphylococcus epidermidis
atgagtaacgacacatctttgatagtcattgtcaaaagttctatatcatcctctcaacatgattttgaaaaaaattatttttattatgtgacacaatttgcaaaattaaatattcgtttatttaatgaagcatacacgtga

SEQ ID NO: 6729 - DNA, 1404 bp, Staphylococcus epidermidis
atgaatgacacaggagataaaaaattaagtcgaacatcattaatcggtcttgttataggttcgatgattggtggcggtgctttcaatattcaatctgatatgggaggccacgctggaggattagcaattataattggatggttgattactgctataggaatgatttcattagcacttgtctttcaaaacctaactaatgaacgatctgatttagatggtggtatttatagttatgctcaagcaggttttggtgattttatagggtttgcaagtgcttggggatattggttctcagcttttttaggtaatgtcgcatatgcaacgttattaatgtcttctatagggaacttttttccaatatttaaagggggcaacacatttcctagtatcatagtggcatcaatattattgtggagtgtgcactttttaatattaaaaggagttgagacggctgctttaatcaatagtattgtcactattacaaaattaattcctatcttattagtgattatatgtatgattgtagcctttaattttaatacattcaagataggtttctttggaatggatggatatggatcattatcatttcatttcgctaatacgatgtcacaagttaaaagtacgatgttagtgacagtttgggtatttattggtattgaaggtgctgttgtattctccggaagagctaaaaataaaaaagatgttggaactgccactgttatcggacttatttcagtattgctcatttacttcttgctgactgtattagcacaaggtattgtaattcaaaatcatatttctaaacttgaggcaccatcaatggcacaaattttagcttatattgttggtgattggggagcaacatttgtcaatattggtcttattatttcagtattaggtgcatggctaggttggacattacttgccggagagttgccttttattgtagctaaagatggtttgtttcctaagtggtttgcaaaagaaaataaaaatggggcacctatgaacgccttattcattactaatgtgttagttcaaatattccttattagtatgctgtttaccaaaagtgcttatcattttgcattttctctcgcggcaagtgctatactttatccatacatgttcagtgcgttttatcaggtgaaatatacaatagaacacaagttaactgcaacgcctaaacaatggattataggaattctagcatctatttatgcaatttggctggtatacgcgtcaggtatagattacttgttacttaccatgttgctctatattccggggattatcgtctatgttgttgttcagaaaaataatcaaaagcgacttacacaatttgactatattttcttcagtcttatcgttattttagcattgatagggttattacgatga

SEQ ID NO: 6730 - DNA, 687 bp, Staphylococcus epidermidis
atgactggaaatcaaatgttttgtagagaaaatgaacttgatgaaagttttaaacaattagcatcttatatcaatattcctgtaggcgtattactgccatttaaaagtcaatgttttgtgagacattacaacaaaggacaaattgtctactattcgtctgatgaaaccacgcatatttacctactcttaaaaggcaatattatgagagaaaattttaatttgaatggtgatgtatatcgatatctgaatagagaaaaagtgctctttcctttaaataacttatttcaagataaagttcctaatgaaatgtgtacagccctaacagattgcgaaatgattggaataccaagagatttaatagaatatttatgcaaaaatcacgaagagatttttgtgaaattattctccttattaagcgaaacacagtgtcaacatattgaatacaatatggctttaacgagtaaattagctaaagaacgcgtgactaagattttacgttacctatgtcaaacagtaggttatgatcatgacgagttttatgaaattaagcattttatgacaatacagttattgagtgatatggcaggaatatctagagaaacgacgagtcatatcataaatgaacttagagaagagaaaatactatttaaaaacagtaaaaattggttggttagtaaagacttataa

SEQ ID NO: 6731 - DNA, 759 bp, Staphylococcus epidermidis
atggctttaataacaatgaattacaattcaccaacgataggaatgcatcaaaatttaacgattattttaccggaggatgtaacattctttgatagttcaacaacagcgaaacatttgaaatcaatgttgttattacatggattgtctagcgatgaaacaacttacataagatatacaagtatcgagcgttatgcaaatgaacatcaacttgcgattataatgcctaacgtcgatcatagtggctatgcaaatatggtatatggacatagttactatgattacatattagaaatttacgaatatgtacatcaaattttaccactatctagaaaaagagaagataattttattgcaggacattcaatgggcggttatggaacgattaaatttgcgctaactcaaagtgataaatttgctaaagctgcaccactttcagcagttttcgaagcacaacgtttcattgacttggattggactgatttttcccctcaatctatcacaggcaacaatactcaaattaaaggtacagaactcgatacgtactacttacttgatcaagccatcgatgctaatgtagatattcctgaattgtttatcatgtgtggtaaagaagactttttatatcatgataaccttcaatttattgagacattaaataaaaaaggggtttcttataagtttgaagatggtccgggaaatcatgattatgcctattgggatagagctattaaacgtgcgattgagtggtttgttcagtaa

SEQ ID NO: 6732 - DNA, 1167 bp, Staphylococcus epidermidis
atgaaaacagtatctaaatattttgtatatatgatgatattagttacgtttttcatagttgttagtgggtgttcgattaatcaatcttttagcgataaacaaaatacaaataaaacaatacgtgtggttgctgtaggtgataatttaattcacccagttgtatataaagatgcacaaattacggggaatagttttgattttaaacctatgtatcaaccagtaaaaaaagacattcaaaacgcagatatttcttttgttaatcaagaatcaccattaggtggggatgataggccttattcaggatttaaaaactttaatacaccgagtagtattgctcaggatttagtagatactggctttaattttgtaaacggtgcaaacaatcatgccttagatcaaggagagcaaggtgtaagaaatcatattcatacttggaacaaatttaaagatcaagttttgttcacgggtgtatatgaatcagaacaagcacaccgtcaaattcctattaaaacaattaaaggtgtgaaagttgctttattaagttacacatttggtacaaacgatcatcaaccaactcatgattatacggtagatacgtttgatgaaaataaaattaagcaagatgttaagaaagccaaacaacaaagtgatgtagtacttgtttcagcacattggggtaatgaaggtaagcatcagcctaacgccactcaaaaaaaatatgcacaaattttcgctgatgcaggtgttgatgtagttttaggtacacatcctcatgtgattcaaccagtaaaatgggttgacggtagagaagggaatcgtacactcgtagcatattcattagggaatttcttgaacggtcagtcaacagggaatgaaagtaatgatttattaggacggatagattttaaaattagtaagaaagataaacagtttcaagttcaagatgtgaagtggagaagtatggtgaattattacgaattaactcaacaccaaaaccagttccttaagtcgaactttaaagtgatgatgctagatgactataatgacaaagatgccactcatcatggtcgcaatcaaatggatagttcttcgatgagccctgcacacttacgagatatcacacgttcagttattgataaacaatatttagacaatcggagtttatag

SEQ ID NO: 6733 - DNA, 126 bp, Staphylococcus epidermidis; identical to SEQ ID NO: 3765

SEQ ID NO: 6734 - DNA, 1650 bp, Staphylococcus epidermidis
atgaaacaacgcgtaggacaatatttaatggacgcggtttattcagcaggtgctgacaaagtttttggtgtcccaggagattttaatctagcctttttagacgatattattgcacataatgatattaaatggattggtaatacaaatgagcttaatgcaagttatgctgccgacggatatgcacgtattaatggcatcggtgcaatggtaacaacatttggagtgggtgaattaagtgctgtcaacggaatcgctggatcttatgctgagcgtgtgccagttattgccatcactggggcacctactcgagctgtagaacaagaaggcaaatacgttcaccattcccttggcgaaggaacttttgatgattatagaaaaatgtttgagcctattacaacagcgcaagcttatattacacctgataatgctaccacagaaattccaagagtaatcaatacggcgcttcaacaacgtcgtccagttcacattcatttacctattgatgtcgcactaacagagattgaaatttcaaacccattcaaaccagaagtcgaaccacaaaaaaacgttcaaagttatatcaatatggttcaagacaaacttgaatcggcatcacaacctgtcattattacaggacatgaaataaatagtttccatctgcataaagaactcgaacaattcgttaatcaaactcaaattccagttgttcagttatctttaggtaaaggtgcatttaatgaagaaaatccttattatatgggtatctttgatggttcaatagcagaacaagatattcaagattatgttaatcaaagtgatgctattttgaatattggtgctaaattaacagattctgcaacagctgggttctcatatcaatttgatattaatgaagtgattatgttaaatcataatgaatttaaaattaatgatacatgcatcgaagcattttcattaccaaatatattaaatggtttaaataagtatattcactacaaaaacactaatgatttcccacaatatgagagaccacaatcacacaattacgaacttagtgatcagccattaactcaagagacttatttcaatatgatgcaagattttttacaacaagatgatattttaatcgctgaacaaggtacatcattctttggtgcttatgacttagccttgtacaaagataatacttttatcgggcaaccattatggggatctatcggctatacactaccagcaacgctaggaacacaaattgcaaatccatatcgtcgaaacattctattaattggtgatggatcactacaattaactgttcaatcattatctacaatgattcgtcaaaatttaaaccctgtgatatttgtaattaataacgatggttatacagttgagagaatgattcatggtatgaaagaaccttacaatgacattcgcatgtgggattacaaatcattaccttctgtatttggtggtgacaatgttttagttcatgatgtaaacacttcagaagaactcatgctcaccttcgaaaatattaaatctaatagtgatcgcatgcactttgtagaagtgaaaatggctgttgaagatgcaccagttaaattaagtaatatagctaaagcattcgcatcacaaaacaaatcatcttaa

SEQ ID NO: 6735 - DNA, 447 bp, Staphylococcus epidermidis; identical to SEQ ID NO: 3767

SEQ ID NO: 6736 - DNA, 186 bp, Staphylococcus epidermidis
atgaatcaaattttagacaatatatattcatataacagaaagttatttagaaatattccactctcaagtattttatttggattgataacaatattaattttcactaaacctcaacttattggtgagataaatataaatatgagaatgacaaaaagaaaattaaatatagacatattattgtattaa

SEQ ID NO: 6737 - DNA, 549 bp, Staphylococcus epidermidis
atgaatgacaaaataaatcatttgattaaaataacaggatggtttacaggaatctttttcttgttactaattatagtatcatgtacggtatggcaaataggatgggtagatatcattagttatactgtaacaatatcaacatttattactatagggtatgaaaggtttatgtggaagtggaaattgtttcgtatatttaataagcaagctgatatatcaggagattatgaggcaacactcagatatttttatggagaaggtggaattaaaaaggtagatgtggaaataaaacaaacttttttaacagtaaatattgaattaaaaagtgatgaaattactagtaatagtattaccgcagatattattaatgaaaatggtaaaaatattttgtattatacttatataacaaacccgaaagctgaatacgaagagaataattctattaatcttggaacaacaagattaattgttgaggaaaccgaattggttggaaagtattggaccggagtaaaaactacaggtgatttaacactaaaaaaattatattag

SEQ ID NO: 6738 - DNA, 975 bp, Staphylococcus epidermidis
ttgttatttactgaagaacaattaaaattatattctaaaccattgtcagaatctgaaaaagaaaagtgtgaaaatgcaataagaattatccaagaatctctggaatcattaggatatgaaaccaaaaaaggtatacacagaaacaatgaagatacgctatcatatcaaattaaaatgactaatccatcgaaaaattatgaactaagtatatttgtgaaaggttcgtatgcaacaaataccaatgtaagacaaaatagtgacgttgatattgcagtggtaaaagaaagtgagttttttgataaatatagggaaggtaaaactagagaaaattataaatttatttctagtaataagcctccgtatcattttaaagatgaagtagaagaagctttgattgaaagatttggaagaagtgaggtaagaagaggtaataaagcaattagaatcaatggcaatacttaccgtaaagaaacagattgtgtaccttgttttagatatagagattatagtaatgattatatggatgatccaaataatttcattggaggaatcacaatttattcagataaaggtgaacgaattataaattatccggaacagcatataaataatagtgttataaaaaataacaatacaaattataaatataaaaagatggttagaataataaaggaaataagatatcaattaatagatagtaaaaatagaaacgcggaacaaacttcttcatttggagttgaaggtttgttttggaacataccggattacaaatatagcaatgatgaaatgttaggtgatacatttaatgcattaattgcatttttaatagataatatagataaattaagtgaatttaaagaacctaatgacattctatatttatgcgattctcaagaaaaaaataatgtttataaaaattttattctagatgtaaagaattattttgaatatagtggtgagaaaaaatatgaatga

SEQ ID NO: 6739 - DNA, 726 bp, Staphylococcus epidermidis
atggcaactatcggatttgaagagaagttatggcaagcggcggataaattacgtggaagtatggatgcttctgaatataagaatgtagcattaggtattataattttgaaatatgtatcagattcatttgaagagaagtatgagaaactgttaaatgatgaatatgcagacgaagaggataaagacgagtatttagcagagaatattttctgggttcctaaagaatcaagatggcaatacataaacgataattctaagaagccagaaattggtcaaattattgataaagctatgactgcaattgaaaaagaaaatgaatcattaaaaggcgtgttacataaagattacgcaagacctgaattagataaagaaaaattaggcgatattattgacctatttacattcaaagttggagattctgaaagtaagaagcaagatgttttaggtcgtgtttataaatactttatcgcgaagtttgcgagtgctgaaggtaaaaatgcgggagaattctatacaccagcatcaatcgtaaaattacatgttgaaatgattgaaccatatgaaagtagaatttatgacccatgttatggttctggtggtatgtttgttcaaagtgaacgttttgtagagcgtcaccaaagacgatatggctatccaccggatcttcaaaaaatggcagtggaacaagttgtagagcaagcagaattaatggcaggtaatttataa

SEQ ID NO: 6740 - DNA, 648 bp, Staphylococcus epidermidis
gtgagtgataaatcttatgctatttcaaaagatatatttaagaagtataaaaatatctacaggttggataaatggactatactactaattattactttattgatatcggttataaccaattttataaatttttataccaatcgtcattttatatcaatttatataatctctctcttattatctatcatcagttttattttcatttatattaaaagtaaaagttataagaataaaattagtcactataaagtcgatgaagaaatgtcaataatatttatagcacacaatataaagaccgaaaaacaactccttatactaaaagaggagattgaaaatgagttaaataaaataagtgaaagtttctccttacacaaaaaaagaattggccgattatttttctatatattttggattccaactggattcttatttgcttattattttaatatttctaatgaagttttaaaatttgatactttaattgaaataataacaggcatgtttactattttttcccaattattctttttatatacaattatatttagctttgctaatcctctcattgacattttagcaagcgacagaaataaatatcgaaaaactttagactacatttatgattatctatactatattaataaataa

SEQ ID NO: 6741 - DNA, 378 bp, Staphylococcus epidermidis
gtgaaaatagaatgggtaaaagaaacactgattcaatataaaagtattgaaccatgtaattttaataatgatttaaatttttggattgaatatattgaatatgttgacaaaaagcttcctcctttcgatacaaatactgttaatgacgaaaattttgatgtgttttatgagttgtttgatcaatcaaaatcaataaaagatttaaatataatttcctctgcttctaatcatattaggttatataaaaataaaattaataataaaatagttgttaaagggatattttgtgtacctattgtaaatgaaaggatatacaacacaaagaaaagcatacttaaagaatcaaacactgatattgtgtcgcaaaaaatcctataa

SEQ ID NO: 6742 - DNA, 126 bp, Staphylococcus epidermidis
atgctaattatagttcagtatcatgaattagttactggattattagattggagttataattcgctagttcctgctttttatgcaatggtaatgcatgggaaatgtgatgttgttatttatgagtaa

SEQ ID NO: 6743 - DNA, 498 bp, Staphylococcus epidermidis
atgtctttatttgatagactaagtgttctaaaaactaaatcagaaataaaacttatagaaagtaagcaagtagttgaagataaaatatttgaaatacgacatggtaaattagatgatataccaatgactaaagaaagaaagcgttcagaaaaagcgaggaaaaaacgtgaaaaacatgaatcaaaggtaaaagaaaaagacaaaagaaagcaacaaagagaagaagaaaaagaaaaaaggagaatagcaaaagaagagcaagaaaagcgtgatgtttggattaaagagaatcaatttaaaattatagtaaatgaggaaggtaaacgaataattttttgtcctaaatgtggtagtgagaataatataactgctactacttggaacgtagatgaagctgaaaatagtgaggatattggaacatattttaagagaacttgtaatttatgcggacattctcaaaaaattaataaagataaccctaaaaaaatttatgaatag

SEQ ID NO: 6744 - DNA, 630 bp, Staphylococcus epidermidis
atgaatttaagaggtcatgaaaatagacttaaatttcttacgaaatatgatgtgacacctatatcacatttaaaattattagaaggtcaaaagaaagacggtgaaggcggcatactgacagatagctattactgtttttcatacagcttaaaaggtaattctaaaaaagttttaggtacgtttaattgtggttatcatattgctgaagatttactaaaattatcaaatcaagataaattacctttatttaacccgtttaaagtaattaatgaaggtaatcaattgcagggcgtaacgaataaaggtaatttaaatattaataggcaaagaaaacagtataatgaaatggctttacagctttcaaatgctattaatttaatcataatttgttatgagggtaatattaaagaaccactttcaacgataaaatacgaaaccgataaatattattatagtgaaccatatgatagtaaaataaaagcagtaaatactattataggtaatttgtttgataagaaattagttgagaagatatctgaaattaatgtaaatcagaaaattagaaaatttgatttttcattactcactaataaaattaaaaaatataagatacaaaataattttgaataa

SEQ ID NO: 6745 - DNA, 243 bp, Staphylococcus epidermidis
atgttaaatatagaagttagtattaaggatactcaagatattataaattattttattgaatgtgacgttaatgataactattatgaaagtgagcaaagaagcagtctcggaaagttagctttagaattggacaaagtaagtaatcagttaaacaatgaaaatattgaagatatgaaaaagataattgaaaaagtagcagaagcaaatagagttatcgctaaatcttctttaagaaaaaattga

SEQ ID NO: 6746 - DNA, 333 bp, Staphylococcus epidermidis
ttgacaactatttctcgtgacttacaagaattagaaatttacaaaatccctgttgaaaataaaaagtatatttacaagaaaataaatcaaacaaatcaattaagtgcaaaaaaacaattagaaatatttagtgatgagattattgaatttataacgctaaataactatgtcttaataaaaacatctcctggctttgctcaaagtataagttattacatagatcaattacaaatgaaagaaatattaggaactattggaggtaacgatactttgatgattttgacttcttcaaatgaaatagcagaatttgtttgttatcaattattcctttaa

SEQ ID NO: 6747 - DNA, 1236 bp, Staphylococcus epidermidis
atggtacaaggacccattcaagtaaatagtgaaataggcaaattgaaaactgtgttgttaaaaagaccaggaaaagaattagaaaatttagtacctgatcatttaagtggtttattattcgatgatattccctacttaaaagttgcacaagaagagcatgacaaatttgctcaaactttgagagatgaaggaatcgaagtagtttatttagaaaaacttgcagcagaatctattactgagccagaagtacgcgagaacttcataaacgatatattaacagaatctaaaaagacaatattaggtcatgaaactgaaattaaagaattcttttcaaagttatctgaccaagaacttgtaaataaaatcatggctggcgtacgtaaagaagaaattcaacttgaaacaactcatttagtagaatatatggatgatagatatccattttacttagatccaatgcccaacctttattttacaagagatccccaagcttcaattggtagaggaatgacaattaacagaatgtattggagagcacgacgtagagaatctatttttatgacatatatactgaaacatcatccaagatttaaagataaagatgtaccagtatggttagatcgtaactcaccatttaatattgaaggtggagatgaattagtattatcgaaagatgttttagctattggtatatcagaacgtacatcagctcaagcaatagaaaagttagcacgtaatattttcaaagatgcaaacacaagttttaaaaaaatcgtagctattgaaatacctaatacacgcacatttatgcacctagatacagtactaactatgattgactacgataagtttacagtacatgcagcaatatttaaagaagaaaataatatgaatatatttaccatagaacaaaatgatggtaaggacgatataaaaattactcgttctagcaagttacgtgaaacacttgctgaagttttagaagtagaaaaagtggactttattccaacaggtaatggcgacgttattgatggtgcacgtgaacaatggaatgatggctcaaacacattatgtattcgaccaggggttgtggtgacatacgatcgcaactatgtatcaaaccaacttttacgcgacaaaggaattaaagtgattgaaattactggtagtgaacttgtacgtggacgcggaggcccaagatgtatgagtcagccgttatttagagaagatatttaa

SEQ ID NO: 6748 - DNA, 1422 bp, Staphylococcus epidermidis; identical to SEQ ID NO: 3570

SEQ ID NO: 6749 - DNA, 1365 bp, Staphylococcus epidermidis
ttgaaagtaaatcaaccactttatttatcgttatatgaaaagttaaaaaatcaaattatcgaaggtcaatatcaatcaaatgatagatttccatctaaacgacagttaagtaactatttatctgttagccacactacaatagaacatgcatatcaattacttgtagatgagggtttcatttattcgaaacctagatctggctacttcgtttccgatatagaatcgttgccagtgatacatcgacaaacaaatcaattaaacactgataacttagaaaagaagcaacgacaatataaatatgcttttaatttagctgaaattgattctgaaagttttcctatgcacatttttagaaaatatgcgaaagacgtttttgaagaccatcagctatcactattacaacgaggcgagcgtcaaggggaatatattttaaggcaacaaatttcacattacttatttaatagtcgtggcgtcacttgtcacccaaatcaaattattgttggatcatcaacaagccagttactcgatatgataaccaatttactaaaaaaagaagaatttattattgaacagccaagttatccacctattaaacatacgcttgataaaaaaggtataagttatattcaagtcccagttgaacaaaatggaatacaaatcgaccctattttaaatacaaataacaatattttgtatataacaccatctcatcaatttccaactggttatgtcaccaatttaaaaaaaagaacacaattaatcaattggtcccatcaagctaagcaaagatatattatcgaagatgattatgattcagaatttagatattttggcaaacccatacctgcattacaaagtttagacacaaaaggaaaagtcatttatattagtactttctcaaaatctttatatccaagctgtaggattgcatatattgttttgccacaaaatttaatgcacaaatataataatcaaaaatataaagagggaaatacagtgcctgtgcatgttcaacacatggttgctcaattcatgataagtgggaaatttgaaagacatttgaataaaatgcgaaagatatatagagataaacttgattatattttaaaacgattaaagccctacaatactcaaataaagattgaaggcgcactaactggaatgcattttacaataactgttaataatggattgtcaatgaaacaatgtttaaaaaatgcgaaaaaaaataatttaaaattaaaaccttatcattacgaaaattattctaaagtttatccaaaatttattttaggatttggggggataaaaaaagaagaattagaagatcatgttaatgcattaattcattcactcgttatataa

SEQ ID NO: 6750 - DNA, 888 bp, Staphylococcus epidermidis; identical to SEQ ID NO: 3803

SEQ ID NO: 6751 - DNA, 561 bp, Staphylococcus epidermidis; identical to SEQ ID NO: 3802

SEQ ID NO: 6752 - DNA, 159 bp, Staphylococcus epidermidis
atggaatcaaatggaatgcaatctattggaatggaatcgaatggaatggagtggaatggaatcgaatggagtggagtcaaatggaatggaaccaaaagaaatggaactgaatggaaaggaatcgattggcatcaaatagaatctaatggaatgctgtga

SEQ ID NO: 6753 - DNA, 168 bp, Staphylococcus epidermidis; identical to SEQ ID NO: 3573

SEQ ID NO: 6754 - DNA, 432 bp, Staphylococcus epidermidis
atgttcaaaaatatattattaccctatgatttcgaaaatgattttagtgctatccctgactatttagaaaaagtcatcgatgaagattcagttgttgtaatttatcacgttgtaacagaaaatgatcttgcaattagtgtcaaatattataataagcataaaaaagatattattagagaaaaagaaaaaaaacttactccatttttacgtgaattagaaaaaagagatattcaatataaaatagatgtagattttgggcatattaaagatacaatcttagaaaaaattacttctggagatataaataatggtgaatttgatttagtaattatgagtaatcatagagtcgatttgaatattaaacatgttttaggagatgttacacataagattgctaaaagaagttctgtcccagtactaattgttaaataa

SEQ ID NO: 6755 - DNA, 327 bp, Staphylococcus epidermidis
ttgttaaaattatactataaattcaactttgcaacagaaccggataacgactatttaattaatcaaaaagtgttcgatgcattttataaagcgttaaaaggaaaacaagttcttgtttattttggactatttaaagacgcaagaaagaaattaaaaaatggagaattagattacttaaaagaagttgatccgaccgaatatatttatcaaattttttatacttggaataaaaaagagtatttagcgagtgaaatttttgatttaacagaaagtgaagaacaagaaatcaatcatcaaatgattgatgaaattgaagaagaaaaataa

SEQ ID NO: 6756 - DNA, 114 bp, Staphylococcus epidermidis
atggaatggactgtaacaaaatggaatcgaatggatggaatcgaacggaacgtaatggaatggaatggattccaatggaatgcactggaacaaaatggaatcgaatggatttga

SEQ ID NO: 6757 - DNA, 339 bp, Staphylococcus epidermidis; identical to SEQ ID NO: 3511

SEQ ID NO: 6758 - DNA, 432 bp, Staphylococcus epidermidis
atgtataatttcaagttacccaagttatcaaatgtacagaatatagggactacgcttgtaagcaatattaatagagtatttagtgacatttttgaacaaatgcaaaataacttgcaaaaacaagaagaaaatttaagaatacttgcaaccaagcaagggatagcttttcctttatctttaccaattcaaatgatgtacgcatttaaattcaatcaaagtaacgatatttatgcttgtataaactatacttattgggtagaagaagaaaattttcattttatttcttatatacaagaagaagtcaatcaagtttataaaaatcattatgttaacaaacaatttaatctaatgaaaagaaatgatttaaatttatttgtcccttttttactagtacttattgaaaaattgtgtagaaagattataaataaataa

SEQ ID NO: 6759 - DNA, 348 bp, Staphylococcus epidermidis; identical to SEQ ID NO: 3494

SEQ ID NO: 6760 - DNA, 159 bp, Staphylococcus epidermidis
ttggtatttactgcacaaaaattagctaatattccaggagttggagaaattgttgagaaatttagtcgttggattatggctgttatttacatagctttaggtttattcattattattgaaaatgacactattggaacaattttaggatttatattttaa

SEQ ID NO: 6761 - DNA, 930 bp, Staphylococcus epidermidis
atgtctaaaatcgtcgtagctttgggtggtaacgctttaggacaatcgcctaaagaacaattagatttattaaaaagtacatctaaatctctagtaagtttaatcgataaaggatacgaaattgtaattagtcatggtaatggtccacaagttggaagtattaacttaggtttaaattatgcggcggaacacaaacaaggtcctccttttcctttccctgaatgtggtgctatgagtcaagcttatattggctatcagatgcaagaaagtttacaaaacgaacttcattcaatgggcatagataaagaagttgttacgctagtaacacaagttcaagttgcaagcgatgattctgctttcaataaccctactaaaccaattggattattttatacaaaagagcaggctgataaatttacgaaagaaaaaggttatacttttgtagaagattctggacgcggctatcgtcgcgttgtcccttccccacaacctataagtatagttgagttagatagtatagaaacattaatcactcatggaacactagttatcgctgccggcggtggtggaattccagtaattaaggaaaatgaagtttatacaggtgttgatgcagttattgataaagataaaacgagtgctttattagcagcacatttacaatctgatcaattaatcatattaactgctgtggaccatgtttacattaactatggaaaagaaaaccaaagaggtctcgatgaagtgtctgtggatgaaatgaaaaaacatatctctgatggtcaatttgctaaaggaagtatgctcccaaaagttgaagctgcacttcaatttcttgaaaaaaatactaaaggcagtgttttgattacatctctagcaggattaggggacgctttagacggtaaaataggaacattaattaagaattga

SEQ ID NO: 6762 - DNA, 999 bp, Staphylococcus epidermidis
atgaaaaatttaagaaatagaaactttttaactttgttagacttcacacaaaaagaaatggaatttttacttaatttatctgaagatcttaaacgcgcaaaatatgcaggaatagaacaacaaaaaatgaaaggtaaaaatatcgctctactttttgaaaaagattcaacacgcactcgatgtgcatttgaaacagcggcttatgatcaaggtgcacatgtaacataccttgggccaacaggttctcaaatgggtaaaaaagagtctaccaaagatactgctcgtgttttaggtggaatgtatgatggcatagaatatcgtggattctcacaaagagtagttgaggatttggcaaaatattctggcgttcccgtatggaatggtttaacagatgaagatcatcctacacaagtacttgctgattttttaacagctaaagaagtattgaaaaaaccatataatgaaattaacttcacatatgttggagatggacgtaataacgttgcaaatgccttaatgcaaggagcagcaatcatgggcatgactttccatcttgtatgtcctaaagaactaaatccaactgatgaattattaaatcgttgtaatgatatagctgacaaaaacggtggtgaaatccttataactgacgatattgatgaaggtgtcaaaggatctgatgtaatttacacagatgtttgggtatctatgggtgaacctgatgaagtttgggaaaaacgtatcaaattattagaaccataccgtgtaactaaagaattaatgaaaaaaacaggtaatccacatacaatttttgaacattgcttaccatcattccatgatactgaaacaataatcggtaaacaaattcaagaaaaatatggtctaactgaaatggaagtaacaaatgaagtatttgaaagtgaacaatcagttgttttccaagaagcagaaaatagagcacatacaataaaagcagtcatggtagcaacattaggagagtaa

SEQ ID NO: 6763 - DNA, 234 bp, Staphylococcus epidermidis
atggcgttaagagctaattcagctaaagaaagaattgaaagaatactacaaattttatgcctttcaattggggatgataatggagaattctatgaattaaaacaaattatgactgttcaattaataagtaatttatctggacttaacagaaaaactactggtgaaataatcagagaattaaaaatagaaaatattatatatcaagataaaagaaattggattataaaaaaataa

SEQ ID NO: 6764 - DNA, 1608 bp, Staphylococcus epidermidis
atgggtggtgcagtaagtgcttctttcaaatggtatgactttgtctacttcattgacactattatctatcttgctattttaatatttaaacgtaaatggttagataatagagcattcagtaaaaaattcgtacccgttgtgatggctacatcagtagcattatttttcttaaatttagcgtttgcagaaacagatcgtcccgaattattaacaagaacttttgaccataaatatcttgtgaaatacttaggaccatataacttcactgtttatgatggtgtaaaaacaatcgaaaataatcagcaaaaagcactagcttctgaagacgacttaactaaagtgctgaattacactaagcagaaacgtactgaacctaatcctgaatattatggtgcagcgaaaaagaaaaatataattaaaattcaccttgaaagtttccagactttcttaatcaataaaaaggtaaatggtaaagaggttacaccgtttttaaataaattatctagtggtaaccaagattttacgtatttcccaaactttttccatcaaacagggcaaggtaaaacatctgactcagagtttacaatggacaacagtttatatggcttaccgcaaggctcagcctattcactgaagggagataatacgtatcaatcattaccagctatactagaccaaaagcaaggttatacatctaatgtaatgcatggtgactacaaaacattttggaatcgagatcaagtttataaacatttcggtattgacaatttctatgatgctacttactatgacatgtctgacgacaatattgttaatcttggtttaaaagataaaccattctttaaagcatcagcagattatcaatctaaaatgaaaaagccgttttattcacacttaattactttaactaaccactatcctttcacattagatgaagaggatgcttctattgataaacctaataccggtgactcaacagtagacggttatatacaaacggcacactatctcgaccaagctttagaggaatatattactgaccttaagaaaaaaggtctatatgataactcagtcattatgatttacggtgaccattatggtatttctgaaaatcataataatgctatggaaaaattattaggtgagaagattacaccagctaaatttacagatttaaaccgcactggcttctggttaaaagttccaggtaaatcagggggcgtaaataaagagtatgctgggcaaatggatgttatgcctacattactacatcttgttggtattgatagcaagaattacctaatgtttggttctgacatgttctctaaacaacacaataacgtagtaccgtttagaaatggtgattttatcactgaagattataagtatgtgaatggtaaaatttactcaaataaagataatgaattgcttactgaaaaacctaaagacttcgataaaaataaaaaacaagtagagaaagatcttgaaatgagtgacagcgtgttaaatggtgacttgttcagattctacaaaaatcctgactttaaaaaagtaaatcctggtaaatatgaatataaatcaggtccaaaagggaacgaaaaaaaatag

SEQ ID NO: 6765 - DNA, 183 bp, Staphylococcus epidermidis
atgaataaactatacaatttttttacaattctattaatcatcatttctttgactataatcattaattcaatattcgtaaccaatggacaaattaaaactacaatcaatgtcagcatgtttatcttagttattattatggcaattgttgctttactattcagatttataaacaataaaaaataa

SEQ ID NO: 6766 - DNA, 120 bp, Staphylococcus epidermidis
ttggtaatcgatcaagatattaacccaatagcacctatttttatcataattactacaatagggacattaatatctatattgtatatgggttcattaattaagattttagggataatttaa

SEQ ID NO: 6767 - DNA, 831 bp, Staphylococcus epidermidis
atgacttttgacccaagtttagtaaaagtagaaacacatattaaaggaaatcagattaatttcggctcggaccctagcaaaaaagaatttaaagaactattagttaatgaaatagtaaaacatatcactacttactatgaatcactcgatgaaacaaatgagaaaatcaaaataaatattgagaatagtttaaaaaaacacccaaatcaatttgatagtgctaaaaatatgattagatttggaaaagatggtgttttcagagattatattgatgatgaaaaaaaattaaataatttaagtagtaagatatttaatgagtttgaacaattaaaatatctaggagaatgttatgatttattaataaatttgcatgggcagagaaaacaaattattacttccatacaagaattggaaaaatttaagaaaaaaaatgctatcattggacaatttaaaaatcatcataaaaaagatattaaaactttcgattttatattatccattaaagttcgaattaagtataacaaagaaaattattcgtttattatgctgaaaaattcattcacaaatgctaaagatatgataaatgaatttgataaagtttctttatacagtttaacaaatactatagatagatatattgttaaagattcaaatggcgaatataaagaagataaaaatggaaattacttgttagatgatattttgataagtaaaattaaaagattctatatcaaagagataaagaatgcaataaataaagaaattaaaagaatcaataagttccgtaaagataactacgatgcaaaaacggtatacggtcattttctataa

SEQ ID NO: 6768 - DNA, 477 bp, Staphylococcus epidermidis; identical to SEQ ID NO: 2806

SEQ ID NO: 6769 - DNA, 624 bp, Staphylococcus epidermidis
atgaatcagacaacgattattggcattgcagggggttcaggctctgggaaaaccacagttactaatgcaatcatgaagaatttagaaggtcatagtgtcgcactcttagcacaagattattactataaagatcaatcacatttaacttttgaagaacggcttgaaacaaattatgaccacccatttgcatttgataatgatttacttattcataatttaaaagatttaagaaatggaaaaccagtagaggtacctacgtacgattattctcaacatacacgtagtaaagaaacaattgcatttgatccaaaagatgttattatcgtagaaggtatctttgctttagaaaacaacacattacgagacatgatggatgtgaaaatttatgtcgatactgatgctgatttacgaattttacgtaggcttacaagagatactaaagagcgtggtcgtacaatggaatcagtaattaatcaatatcttaatgtagtaagacctatgcatgagcaatttattgaacctacaaaaaagcatgctgacatcataattcctgaaggaggcagcaataaagttgccatagatattatgactactaaaatccagtcactcgtaagcaaaaaatag

SEQ ID NO: 6770 - DNA, 1269 bp, Staphylococcus epidermidis; identical to SEQ ID NO: 2808

SEQ ID NO: 6771 - DNA, 924 bp, Staphylococcus epidermidis; identical to SEQ ID NO: 2809

SEQ ID NO: 6772 - DNA, 636 bp, Staphylococcus epidermidis; identical to SEQ ID NO: 2810

SEQ ID NO: 6773 - DNA, 309 bp, Staphylococcus epidermidis
atgacagaacataatcacgatgctgagttaacaataaataatgaagaggaattacttacgttatatgatgaaaacggaaatgaagttttataccgtaaaatgttagaattttatcatccagaattcaaaaaagaatatgtcgttcttgcagaagaaggtgcacaatcagatgacgaagatatgattgaacttgtaccaatgataaatgaacctgatgagtctggtgatggtggggaattagtccctattgaaacagatgaagaatgggatatgattgaagaagttgtaaatactgagattaacgaataa

SEQ ID NO: 6774 - DNA, 429 bp, Staphylococcus epidermidis
atgctaaagcataaaattttaggactagatgttggaagtaaaactgttggcattgctataagtgaccttatgggttggactgctcaagggttagacacactccgtatcaacgaagaacaagatgatttaggaattgatcaactcgtgaagattattaaagataatcaagttggaactgttgttattggcttgcccaagaatatgaacaattcaataggttttcggggagaggcttcaataaaatataaagaaaagttacaagagtctatcccttctattgatattgttatgtgggacgaacgtttaagtacaatggctgctgaaagatctttacttgaagcagatgtttcaagacaaaaaagaaaaaaggtaatagataaaatggcagctgtatttattttacaaggctatttagattctattcaataa

SEQ ID NO: 6775 - DNA, 261 bp, Staphylococcus epidermidis; identical to SEQ ID NO: 2813

SEQ ID NO: 6776 - DNA, 2631 bp, Staphylococcus epidermidis
atgaaaaaaatgaaagctagtgaaattaggcaaaaatatttggatttctttgtagaaaaaggacatatgattgaaccgtctgcaccacttgtacctatcgatgatgattcattattgtggatcaattctggtgtagctaccttgaaaaaatactttgacggacgcgaaactcctaaaaaaccaagaattgtcaattctcaaaaagctatacgaacaaacgatatagaaaacgtcggttttactgctcgccatcatactttttttgagatgctaggtaatttttcaatcggtgactactttaaacatgaagcgattgaatttgcttgggaatttctaacaagtgataaatggatgggcatggaacctgagaagctatatgtgactattcatcctgaagatactgaagcttttagaatttggcatgaagacattggtttagaggaaagtcgcatcattcgaatagaaggcaatttttgggatatcggggaaggaccatctggaccaaatacagaaattttctatgatcgtggatcggcttatggaaaagatgatcctgctgaagaaatgtatcctggtggtgaaaatgaaagatatttagaagtttggaatctagtgtttagtgagtttaatcacaataaagacaatacttacacaccactaccaaataaaaatattgatactggcatgggattagaacgtatgacgtctatctcacaaaatgtaagaacaaattatgaaacagacttatttatgcctataattaaggaagtagaacatgtttcaggaaaaaaatatttaattgatgatgcacaagatgttgcatttaaagttatcgcagaccacattagaacgatttctttcgcaattgctgatggcgcattaccagctaatgagggtagaggatatgtattaagaagattattacgcagagcagttcgctttagccaatcattaggaattaatgaaccatttatgtataaacttgttgatatagtcgctgatatcatggaaccatattatccaaatgtcaaagacaaatccaactttattaaacgtgtcattaaatcagaggaagaacgcttccatgaaacgcttgaggaaggtcttacgattttaaatgaactgataaaagaagcgaagaatagtgatcaggttattaaaggtcatgatgcttttaagttatatgatacttatggattcccaatagaattaactgaagaattagcaactcaagaaaatttgtctgttgatatgcctacttttgaacaggaaatgcaacaacagagagatcgagctagacaagctcgacagaattctcaatcaatgcaagttcaaagtgaagtactaaaaaatattcaagatgaaagtcaatttgttggctatgaaactacggactatcaatcattaataactcatatcatatacaatggtgaagaagttaaacatgttgaagcaggagaaacaatttactttattttaagagaaacgcctttctatgcagtaagtggtggacaggtcgcagataagggaacagttggtaatgagagctttgaaataaatgtaactgacgtaactaaagcgcctaatggccaaaacttacacaaaggtattgtgcaatttggtgaagcaacacagaacgcgaaagtagaagcacgtgttaacaaagaggatagacgacttattcaaaaaaatcatagtgctacacatttattacatgctgcattaaaagaagtattaggagatcatgttaatcaggctggttcgttagtagaacctgaaagactacgttttgatttctcacattttggtcctatgacacaagaagaaattaatttagtagaacgtagagtaaatgaagaaatttggagagctatcgacgtccgtattcaagaaatgagtattgaagatgccaaatcaataggcgctatggctttatttggtgaaaaatatggagatattgttcgcgttgtcaatatggcaccattttcaatagaattgtgcggtggaatacatgtgaataatactgcggaaattggtctctttaagattgtgagtgaatctggaacaggtgccggtgttagaagaattgaagctttaacaggtaaaggtgcattcttacatcttgaagaaattgaaacacagtttaataatattaaaaatcatttaaaagttaaatccgataaccaagtagttgaaaaagttaaacaacttcaagaagaagaaaaaggactgcttaaacaattagaacaacgcaacaaagaaataacatcactaaagatggggaacattgaagaacaggttgagttgattaataatttgaaagttttagcaacagaagtagaaattccaaatccaaaagcgatacgttcaactatggatgactttaaatctaaacttcaagatactattatagtgttagtcggacaagttgatggaaaggtttctgtaattgctacagtaccaaaatcacttacaaatcaagtaaaagctggagatcttatcaaaaacatgacaccaattattggtggaaaaggtggaggtcgtcctgatatggctcaaggtggcggaactcaacctgaaaaaataacagaagcattacgctttattaaagattacattaaaaatctataa

SEQ ID NO: 6777 - DNA, 2433 bp, Staphylococcus epidermidis
atgtctgaccctacactttttgattattcaatgatcaaaggtacagttgatgctattttatttcaaaatacggataatttttatactgttctaaaagtagatactatagaatcaaatgaaaaatttgatagtatgccaactgtggtagggtttcttcccaatgtagttgaaggcgatgtttatacttttaaagggcaagtcgtacaacatccacgttatggtaagcaattaaaggctgaaacatttgaaaaagaattacctcaaactaaagaagccattattagttacttatcaagtgatttatttaaaggcatcggtaaaaaaacggctcaaaacattgtaaatacactaggtgaaaatgctataaatgatattttaactcgtccagaaatcttagaaagtgtacctagtttaccaaagaagaaacaaaagcaaattgctgatcagattaatgcaaaccaagaatctgagaaaattatgatacgtttacacgacctagggtttggtccgaaattatcaatggctatatatcagttctatatgggtgatactttaaatgtcttagataaaaatccttaccaattagtatatgacattaaaggtattggttttaataaggctgaccaacttgctcgaaatgtcggtattgagccacattcacctgaaagattaaaagcagcattattatttacgttagaagaagaatgtatcaaacaaggacatacatatctacctcgtacaattgttatagaaacaacacaaaatttactcaatgaagatattgagaaaccaattgaaacagagcaattactagaaatcattgacgttttatcagaagagaaaaaattaatatctgaagctgatcaggtatcaattccaagtttatactattcagaattgaaaagtgtgcaaaacttataccgaattaaaacaaacacatctaaattaaaagaaatagaacagtctgatttacaaatacatattggtgatattgagtcacaaaatgaggttaattactctgcctctcaaaaagaagcgcttgaaacagcaataaattctaaaattatgcttttaactggtggtccgggtaccggtaaaaccacagtcattaaaggtatagttgaattatatgcagaaatacatgggctctcgctcgattatgatgattacaatgaagatgattatccagtagtgttagctgcacccactggtcgtgcttctaagcgccttcacgaatcgacaggtttagaagcaatgacaattcatcgtttaatcggttggaaccaagatacacaaccacaggatattttagaaaatgagatcaatgcaagactcattatcatcgatgaaatgtcaatggtagatacttggttgttccatcaatttttaagcgctgtgcctttagaagcacaaattgtatttgtcggagatgaagatcagttaccatcagtaggtccaggacaggtatttaaagaccttattgattctgaaataataccgcgtgttaatcttaccgaagtatatcgtcagcaagatggttccagtattattgacttagctcaccgtatgaaattaaatgaacctatcgatattactaaacgttatcatgatcgtagttttattcgttgtggtacgaatcaaattccagacgttgttgataaagtagttaaaagcgctgtagctaaaggctatgatatgagtgatatacaagttttggctcctatgtataaaggtaacgctggtattaagagacttaaccaagttctacaatctattcttaatccgaagcaacaagatgatcgtgaaatagaatttggtgaagctgtgtttagaaaaggggataaagtacttcagttagttaatcgacctaatgataatatatttaatggggatataggtataatagtaggtatattttgggccaaagaaaatgctctaaataaggatgtgttagttgtagattttgaaggtaatgaaattacatttactaaacaagatttaatggaactaacacatgcatattgtacatctatccataaatcacaaggttcagaatttcctattgtaattatggctattgttagacaatattataggatgttacaacgtcccattctttatacaggattaactagagctaaacaatcacttgttttgcttggtgaacaagaagcatttgatataggtttaaaaacaaatggacaaatacgattaacgcaattaaatgatttgttaaaatcgtattttggacaaaacaaagataatttaactacaaataaacaaacgattaacgaacaaaaagaaaataacaatcatctggatttgaaaaatgaaaaagaaaatgatatccaattaaacgagtcgacaattttccaaatcgatccaatgattaatatgggggaaatgacgccatatgacttcgttgaacgttga

SEQ ID NO: 6778 - DNA, 669 bp, Staphylococcus epidermidis; identical to SEQ ID NO: 2816

SEQ ID NO: 6779 - DNA, 1119 bp, Staphylococcus epidermidis; identical to SEQ ID NO: 2817

SEQ ID NO: 6780 - DNA, 1143 bp, Staphylococcus epidermidis
atggaagtatacgcagattatgctgcgactacgccagtaaaaccagaagtaatagatgctatgatggaaatatatcaatctcattttggtaatccatcgtcaatacattctattggtagagatgcacgcaaatatcttgatcagtcacgtcgtacagttgcacaattgttgggagcgaatccgaatgaagtaatatttacaagtggtgcaacagaatcgaataacactgctattaaaggattagtgaaagcgaatgaacaattaggtaatcatattattactaccaaaattgaacaccattcagtattacacgtatatgagcaacttgaaaaagaaggttatgatgttacgtatctagatgtagatgatactggtgcagttgatttagaccaattaaaagaaacaattaatgatagaacaattttagtatcaattatgtttgtaaataatgagattggaacagtacaaaatatttatgatattgaagatattattgcagacactcatgcgttattccatgttgatgctgttcaagcaattggacatttagatttagattttcataattttaaaattgatacaatgagtatttcagcacacaaatttggtggtcctaaaggtgttggtctactattagtaaaagagcatacaccaatagcatataatcaactcggtggtgaacaagaaaccaaacgtcgagcaggtacagaaaatttacctcaaattgttggattaacaaaggcacttgaattagctataaccaatcaagatgtaaataatgttcatttaatgaatttaaaagaattatttttagttcaattacaggaaagggcaattccatttgaattaaacggttcaatgacagattcaacgggtcatattttaaatatttattttccatttatagatgttgaaacaatgttaacattattggatttagcccatgtatatgtatcttcaggttctgcttgtacagcaggttcaacgactccatctcatgtacttgcagctatgtttgaagatgaagaacgagcaaaacattcagtacgttttagctttaatgaacaaacaacaacgcaagaaattaaatatattgtagctgaaattcataaaatctatcataaatttaaggaggaatcatag

SEQ ID NO: 6781 - DNA, 996 bp, Staphylococcus epidermidis
atgaaaaatataaaattatctgcgttaaacttagtacctatacgtgaaggtcaagaagataaagatgcaattaacgatatggttacactcgctcaagcattagatgatttagattatgagcgctactggattgcagagcatcataatgctccaaatttagttagttcagctacttctctattaattcaacatacattagaacatactcattctatcaaagtaggttctggaggcataatgttaccgaatcatgcaccactagtcgtagcagaacaatttgggacattggaaacattattccctcaacgtgtggacttaggattaggacgtgctcctggtacagatatgatgacagcgagcgcattaagaagagatcagcataatggtgtttatcaattccctgaagaagttgaacaactgcaacaatattttggaccgagtcatcaacaagcatatgtacgtgcttatcctgcggtagataaaaatgtcccaatgtatattctaggttcatctacagattctgcacatttagttgcacgtaaagggttaccatatgtttttgcaggacattttgctccacaacaaatgaaggaagcactacaaatttatagagaattatttgaaccttcagaagtacttgataaaccttatgtaattgtttgtttaaatacaattgtgtcagattctgatgaacaagcagaatatttagcaactacgatgtctcaaataatggtaagtataacacgaggaaaaatgcaacctgtccaaccaccaacagatgatttaaaggccctattaacaccacgcgaatatgaattagcacaacaacgtttaaaagggtcacttataggatctgaagatacagttaaacaaaaacttgaatcgttcataaaagagtacggggatatcgatgaacttatggcaattagttatatctatgatcaagacaaacaaatagaatcatatcgaagattagaacgtgcaattaaatcatag

SEQ ID NO: 6782 - DNA, 144 bp, Staphylococcus epidermidis; identical to SEQ ID NO: 2820

SEQ ID NO: 6783 - DNA, 423 bp, Staphylococcus epidermidis; identical to SEQ ID NO: 2821

SEQ ID NO: 6784 - DNA, 1272 bp, Staphylococcus epidermidis
gtgagtacagaaccattagcctctcgaatgagaccgaaaaatatagatgaaattatatctcaacaacacctggttggtccgaaaggtataataagaaggatggtagatactaaacgtctttcttctatgattttttatggtccacctggaattggtaaaacaagtattgcaaaagcaatttcaggcagtacacaatttaaattcagacaattaaatgccgtaacaaatacaaagaaagatatgcagctagttgtcgaagaagctaagatgtcaggacaagttatcttactattagatgaaattcatcgtttagacaaagctaaacaagattttttattaccacatcttgaaaatggcaaaattgtattaataggtgcaacaacttcaaatccttatcatgcgataaatccagcgatacgatctagagcacaaatatttgagctttacccattagatcaagatgatataagattggcattagatagagctataaatgataaggaaagaggtttaagtacttatcatcctattgtagatgaagatgctatcgaatatttttcaacgcaaagccaaggcgacgttaggagtgcattaaacgctttggaattagctgtactaagtgctcatattggcgaagaaaacgtaagacatattacattagatgacgcaaaagattgcttacaaaaaggtgcttttgtaagtgataaagatggagacatgcattatgacgtcatgagcgcttttcaaaaatcaattagaggtagtgatgtcaatgcagcactccactacttagcacgtctaattgaagctggtgacttacctacaatcgtacgtcgattacttgtaattagttatgaagatgttgggttagcatcacctaatgctggtcagaggactttagcagcaatacaatcagctgaacgtctaggttttccagaagcacgaattccccttagtcaagctgtaatagaattatgcttatcacctaaatcaaattctggtatcacagcaatagataaagctcttggcgatataagaaatggacatataggtcaaataccggattatctgaaagacggtcattattcaggtgctaaaaagttaggacgggctataggttacaaatatcctcataactatgaaaatggtcatgttgtacaacagtacttaccagaaaaattaaaaaacagagtgtattatgaaccaaaaaccacatcaaaaagtgaacaacaatttaaaacaatttacgataacttacgaaataaaacataa

SEQ ID NO: 6785 - DNA, 777 bp, Staphylococcus epidermidis
atgaaacatcaattttcaaggaatgaattagcaataggacaagaagggctggacttactaaaaaataagactgttgcagttttaggtgttggcggcgtcgggtcatttgcagctgaggcattggctcggactaatatagggcacatcatacttatagataaagatgatgtcgatattacaaatgtgaacaggcaaattcatgcactgacttcaactattggtcaaagtaaagtcacgctaatggaagaaagaatcaaattaataaatcccgattgtaaagtaacttctttgcatatgttttataccgaggaaacatacaaagatatcttcaataattatgatattgattattttattgatgcaagcgatacaatcatttataaagttcatctcatgaaagagtgtttagaaagaggaattgagttaatttcaagtatgggtgcagcaaataagactgaccctacacgttttgaaattgcagatatttcaaaaacacatactgatcctatggctaaagtaattagaaatcgtttaaaacgccttggtattcgtaaaggtgttaaagtagtattttctgatgaaagtcctattgttattcgcgaggacgtaaaagaaacagtaggagataaaaatgcaatcaatagaaaaggacaaatgcctccatcttctaatgcatttgttccaagtgtagtaggccttatttgtgcaagctacgttgtcaacgatattttaaaagatatacctgtaaggcgaattaaagataaaggacaaaattaa

SEQ ID NO: 6786 - DNA, 1767 bp, Staphylococcus epidermidis
atgaataaaagaacaacgtattgtggtttagtcacagaagaatttttaaacgaaaaagtaacattaaaaggttgggttcataacagacgagatttaggtggattaatttttgttgatttaagagatcgtgaaggtattgtccaaatagtttttaatcctgacttttccgaagaagcattgcaagttgctgaaacagtacgctccgaatatgtagtcgaagttcaaggtgtagtaacaaaacgtgatgctgaaactattaacccaaaaatcaaaacaggtcaagttgaggttcaagtttcaaatattgagattattaacaaatcagaaacacctccattttcaattaatgaagaaaatgtaaacgttgatgaaaatattcgattaaaatatagatatttagatttacgtagacaagaattagcacaaacttttaaaatgagacatcaaactacgcgttctatccgtcaatacttagataataatggcttcttcgatattgaaacaccagtattaacaaaatcaacacctgagggtgcgcgagattatctagtaccttcccgtgtacacgagggtgaattttacgcgttgccacaatcaccacaattatttaaacaactattaatgataagtggttttgacaaatattatcaaattgttaaatgtttccgtgatgaagacttacgtgcagatcgtcaaccagaattcactcaagttgatattgaaatgagttttgtcgatcaagaagatatcatagccatgggtgaagatatgttacgtaaggttgtaaaagatgtaaaaggaatagacgttagtggcccattcccacgtatgacatatgcagaggctatggaccgttttggttcagataaacctgacactcgtttcggtatggaacttatcaatgtgtcacagcttggtaaagaaatgaattttaaagtttttaaagatacggtagataacaacggcgaaattaaagcaattgtcgcaaaagacgctgcaaataaatatacacgtaaagacatggatgcattaacagagtttgtaaatatatatggtgcaaaaggattagcttgggttaaagttgttgatgatggtttaagtggcccaattgctagatttttcgaagatgttaatgttgaaacacttaaacagttaacagaagctaaacctggagatttagtaatgtttgtagctgataaacctaatgttgttgctcaaagtttaggggctttaagaattaaattagcaaaagaattaggtttaattgatgaatcaaaattaaatttcttatgggtaactgattggccgttattagagtatgatgaagatgcaaaacgttatgtagcagcacatcatccatttacttcacctaaaagagaagatatcgaaaagctagacactgaacctgaaaatgtacaagccaacgcttatgatattgttctaaatggttatgaacttggtggtggttctataagaatacacgatggtgaattgcaacaaaaaatgtttgaagtattaggatttactaatgaacaagctcaagaacaatttggtttcttattagatgcttttaaatacggtgctccacctcatggtggcatcgcgttaggtttagatagacttgtgatgttattaacaaatagaacaaacttgagagatacaattgcattccctaaaacagcatcagctacatgtcttttaactgacgctccaggagaagtatctgataaacaactccaagaactctcactaagaatcagacactag

SEQ ID NO: 6787 - DNA, 1275 bp, Staphylococcus epidermidis; identical to SEQ ID NO: 2825

SEQ ID NO: 6788 - DNA, 876 bp, Staphylococcus epidermidis
atgaagaaaatagattcatggctaactaaacatggtctaaaaaatcgacttacgctcgtagtaattgtaatttttattatatttttaattttactttttatgtttgttaatttaagtgatgaagatacaggtcaaattactataactgagaatgctgagttaagaacaggacctaatgccgcctatcctgttatttataaaatagaaaaaggcgaaagttttaagaaaatagatcgaaaagggaaatggattgaagttcaaaatcacgctggcactgagaaaggctgggttgctggttggcacacaaatttgaacattccagctgatcaatcactttcgtcaaaccctctaaaaggaaaaacaattgtacttgaccctggtcatggtggaagtgatcagggcgcctcaagtagtacaccatctaaaagtctcgaaaaaaattacacacttaaaactgctaaagaattaaaaaagttattaaataaggaaggtgctcatgtaaaaatgactcgttccaatgataaatatgtgtccctagatgatagaaatataaagggtgacgcatttattagtatacataatgatgcgcttgattcttcaaatgccaatggagtgactgtttattggtttaaagaaaagcaagaatcacttgcacaaactttaaattctgcaattcaaaagaaggcattattgacaaatcgaggttctagacaacaaaattatcaagtgttgagacagacagatataccagcagtactgttagagttaggctatataagtaatcctactgatgaatcaatgattaatgatcaattacatagacaagtggttgaacaagctattgttgatggtttaaaacaatatttctcgtcctag

SEQ ID NO: 6789 - DNA, 453 bp, Staphylococcus epidermidis; identical to SEQ ID NO: 2827

SEQ ID NO: 6790 - DNA, 2190 bp, Staphylococcus epidermidis
gtgaataacgagtatccatatagcgcggatgaggtgctttataaagctaaatcatatttatcaacaagtgaatatgaatatgttctcaaaagttatcatatagcttatgaggcacataagggtcaatttagaaaaaatggcttaccttatattatgcatcctattcaagttgcagggattttaacagagatgcgtttagacggacccactattgtcgctggatttctacatgatgtgattgaagatacttcttatacatttgaagatgttaaagatatgtttaatgaagaaattgcacgaatagtagacggggtaactaaacttaaaaaggttaagtatcgctctaaggaagaacaacaagcagaaaatcatcgtaaactatttattgctattgctaaagatgtacgcgtaattttagtgaagttagcagatcggcttcataatatgagaactttaaaggcaatgccaagagagaagcaggtaagaatctctaaggaaaccttagaaatctatgctcctttagcacatcgtctcggaatcaacacgataaagtgggaacttgaagatacagcgctgagatatattgacagtgtgcaatatttccgcatcgttaatcttatgaagaaaaaacgtagtgaacgcgaagcttacattacaaatgcaatcaataaaattaaaaacgaaatgactaaaatgaatctttcgggcgaaattaacggtagaccaaaacatatttacagtatataccgcaaaatgataaaacaaaaaaagcaattcgatcaaatatttgatttgcttgctatacgtattatagttaattcgataaatgattgttatgcgacacttggtttagttcatacattatggaaaccgatgcctggacgttttaaagattatatagctatgcctaagcaaaatatgtatcaatcactacataccactgtagttggacccaatggcgatcctttagaaatacaaattagaacgcacgaaatgcatgaaatcgctgaacatggtgttgctgcacattgggcttataaagaaggtaagacagttaatcaaaaaacacaggattttcaaaataagcttaattggttaaaagaacttgctgaaaccgaccatacttctgcagatgcgcaagaatttatggaatccttaaaatatgatttacagagcgataaggtatatgcatttactccagctagtgatgttatagagttaccttatggtgcagtaccaattgattttgcttatgcaatacacagtgaagtaggaaataaaatgattggtgctaaggttaatggtaaaatcgtacctatagattatgttctacaaactggtgatattatagagattcgtacaagtaaacattcttacggtccaagtagagactggttgaaaattgtaaaatcttctagtgccaaaagtaaaatcaaaagtttctttaaaaaacaagatcgttcttctaatattgaaaaaggtaaatttatggtagaagcggagattaaagaacaaggattccgtgttgaagatattctaactgagaaaaatttagaagtcgttaatgaaaaatatcattttgctaatgatgaagatttgtacgcagctgttggattcggtggtgttacatcaatacaaatcgtcaataaattaactgaacgacaaagaatattagataaacaaaaggcattaaatgaggcgcaggaagttacaaaatctgtacctataaaaaaagatattaccacagacagtggtgtatatgttgagggattagaaaacgtcttaatcaagttatcaaaatgttgtaatcctataccaggtgatgatattgttggttatatcactaaaggacacgggattaaagttcatcgtacagattgtccaaatataaaaaatgagacagatagattgatttcggtagagtgggtaaaatctaaagattcaacacaacaatatcaagttgatttagaagttactgcatatgatagaaatggcttgcttaatgaagtattacaagctgtaaattctactgctggaagcttgattaaagtatctgggcgttcagacattgataaaaatgcagtaattaatattagtgtgatggtaaaaaatgtcaatgatgtgtaccgtgtcgttgaaaaaattaaacaactaggtgacgtttatacagtatctagagtttggaactag

SEQ ID NO: 6791 - DNA, 519 bp, Staphylococcus epidermidis; identical to SEQ ID NO: 2829

SEQ ID NO: 6792 - DNA, 2274 bp, Staphylococcus epidermidis
atgattaaatcaaaatataattgggatataactcaaccgaatacctttataagtgagagtagcagtgatcaatttaaactttcacctatagtaaaaaaggtattagagagtaaaaatattgtggataatcaggagattcaaaatctatttgaaggcactaacattagtcatgattatatgttattaagtgatatgcaaaaagccattgatcgtattaaattagctatcgatcaaaatgaacgaatactagtatatggtgactatgatgcagatggtgttacatctactacaattctagtgtctactttacgtctacttggcgctcaggtggggtggtatattcccaatagatttacagaaggatatggacctaatgaattagcatttaaaaatgcttatgacgaagggatttccttaataataactgtagataatggtatacagggacatcatgaaataagtaccatacaagaattaggtgtagatgttatagtgacagatcatcatgaaataggagaaactttacctgatgcttttgcaattgtacatccgatgcatcctaattttgaatatccttttaaatatttatgtggtgcgggtgttgcttataaattggcccaaggattgatagagcatccacctcaacatttcatagcattagctgccataggtacaattgcagatttagtatcattgacagatgagaatagatatattgtaaagcaaggattaaagatattaaacaatcatacaccatcgtccataaaggctatcttaaatcaagcgtgttttaatgatgaaataacagaagaaacaattggttttattattggacctcgattaaatgcggttggtagactagaagatgcatcattagctgctgaacttttattgtccgatgaatttgaagaggcggaatttttagctgaacaagttgaacattttaatcatgaacgtaaagatatagtatctaaaattactgatgaagcattgttattagcagaggaacaaatcaagcaaggccatttgtttcttttacttgccaaagaggggtggcatgagggtgtattaggtattgttgcatctaaaattgtagaaacatatgcactacctacattaattttaaatattgatgaaaatcaaaatcatgccaagggttctgcgaggtcaattgaacaagtttccatgtttgatattttaaatgaccatcaacagttaattgataagtttggtggtcatcacatggctgcaggaatgacaatgtctatcgataatattgaacatttacataaagagctagatatgtggatgaaagaactaactgttaccacttcattagagccttcaataaaggtggatgcacaacttgaagaaaaagaaattaacattaaaaatattaaagatatatttcaattaaggccttttggtacggactttaatagtcctctttttatggttagagatctaattgtcaagtcaacaaagggaattggacaggataataagcatcttaagttaacgcttggtcattcaggtttaactgctttattttggaatcatggacatttggcaagtgaacttgaaccaggtcaaccgattcatataataggaacattgcaaattaatgaatggaatggtaatcaaacacctcaatttatcatcaaagacattgctatagaccaattacaaattttagattatcgtagtaaacgtaaaaatatacaatttaaagaatctgaatcaaatgttgcctatgtcattcatccgaaacttaaaaaaagcaattcacattactatcattatggtgaggctattgatagaccttatgataaaatagtgtttagagatttacctaatactatggttgaaattgaacaaaccttagaacattcacaaatttctcaactatatttagttctgcagcatgaaaagtcaatatattttgaaggtatccctagcaagtcgctttttaaaaagtgttacaaagctttaataaacaaaaaagaaactgacttaattaaagaaggtatgctgctttgtgagtacttaaatattaagccagaaatattaacattcatgcttaaagtctttaaagaattggagtttatttacgacgaaaagggattgattaagataaatccagcgccaaataaacaagatatagaaaatagtcgtatttaccaaatgagacgagcacgtatggaagtagaagaacgtcttctctatgatgattttttaaatataaaagaatggataatatcaaagttaacatag

SEQ ID NO: 6793 - DNA, 117 bp, Staphylococcus epidermidis
atggaaatttcagttcttatctccacacgtgatatttcacgacatgtaaatgatattgtagaaataattccagatacagaattcgatgaattcagacatcatcgtggcttaatataa

SEQ ID NO: 6794 - DNA, 2226 bp, Staphylococcus epidermidis
atgacgtataagaatgtagttaaaaatgttaatttaggtctagatttgcaaggtggttttgaagtcctcttccaagtagatcctttaaataaaggagataaaattgataaaaaagcacttcaagctacatctcaaacattagaaaatcgtgtaaatgttctaggtgtatcagaaccgaaaatacaaatcgaagatccaaatcgaattcgtgtacaattagcaggtatcaaggatcaagcacaagcgcgtaaattattatcgacacaagctaatttaacaattagagatgctgaagatcatgttttaatgtctggttcagacattaaacaaggctctgctaaacaagaatttaaacaagaaactaatcaaccaacagttacatttaaagtaaaaagtaaagataaatttaagaaagtaactgaaaagatttctaaaaaacgtgacaatgtcatggtagtttggttagatttcgaaaaaggcgatagttacaagaaagaagctaaaaagcaacaagaaggtaaaaagcctaaatttatatctgcagcgagtgtagaccaacctattaattctagtagtgttgaaatttcaggtggcttcaatgggaaaaaaggtgttgaagaagcgaaacaaatagctgagttattaaatgccggctcattaccagttgatttaaaagaaatttactctaactctgttggtgcacaatttggtcaagatgctcttgataagaccatgtttgcatcaattgtaggtatagcattaatttatttatttatgcttggtttctatcgtttgcctggtttagttgcaatcattgccttaaccacttatatttatttaactttagtcgcattcaatttcatatcaggtgtattaactctacctggattggcggcattagttttaggtgtaggtatggctgtcgatgccaatatcataatgtatgaacgtattaaagatgaactaagaattggacgcacgcttaaacaagcgtattcaaaagcaaataaaagttcattcttaactatatttgattccaacttaacaactgtcatcgctgcagctgtgcttttcttctttggagaaagttcagtcaaaggcttcgcaaccatgttactcttaggtattttaatgatatttgtaaccgcagtattcttatcaagagggttgttatcattactggtatcttcaaacttctttaaaaaacaatactggttatttggtgttaagaagaaggatagacatgatattaatgaaggtaaagatgtacatgatttaaaaacatcatatgaaaggttaaactttgttaaattagctaagccacttatttcacttagtattttaattgtaattattggtttgattatcatttcaatatttaaattaaacttaggtattgatttctcatccggaacaagagcagatattcaatctaaaaatgctataacacaagcacaggttgagaaaactgtaaaatcagctggattggaaccagatcaaatacagattaatggtagtggaaataaaaatgccacagttcagtttaaaaaagatttatcacgtgaggaagacaataaattaagtgctaaggtgaaatctgaatttggagataatccacaaattaataccgtttcacctctcataggccaagagctagctaaaaatgctgtaactgcattaatacttgcttctataggcattattatctatgtttcactaagatttgaatggcgtatgggtctatcttctgtacttgcattattacatgacgtatttatcatcattgcaatctttagtttgtttagattagaagtagatttaacgtttattgcagcagtattaactatcgttggttattcaatcaatgatacaatagtaactttcgaccgtgttcgagaaaatctgcataaagttaaagttattacgcatactgatcaaattgatgatatagtcaaccgctctattagacaaactatgacacgttctattaatacagtgttgactgtagttgtagtggtagttgcaatattaatattaggtgcaccaacaatatttaatttctctttagcattgctaattggattattatctggtgtattctcgtcaattttcattgctgtaccattatggggcatgcttaagaaacgacagtttaaaaagacaaaaaataataaattagtagtacacaaagagaagaaatctaacgatgaaaaaatcttagtttaa

SEQ ID NO: 6795 - DNA, 261 bp, Staphylococcus epidermidis; identical to SEQ ID NO: 2833

SEQ ID NO: 6796 - DNA, 1140 bp, Staphylococcus epidermidis
atgcctgcagtgacatatgagcatataaaaacatgtaaacaatccggtgccagattaggaattgtacatacaccgcatggatcttttgaaacaccaatgtttatgccggttgggacaaaagcaacagttaaaacaatgagcccggaagaattaagaaacatagaagcaaagattatattaggaaacacatatcatttgtggttacaacctggaaatgatattatcaagcacgctgggggattacacaaattcatgaattgggacggtccaattttaacagattctggtggtttccaagtatttagtttaagtaatttgcgtaaaatttctgaagaaggtgtagaatttagacatcataccaatggctcaaaactatttttgagtcctgagaaatctatgcaaatacaaaatgatttaggttctgatattatgatggcatttgatgaatgtccaccaatgccagctgaatatgattatgtcaaagattcaatcgaacgtacaactcgatgggcagccagatgtttaaaagcacatcaacgccctgaagatcaagcactgttcggtattattcaaggtggagaatacaaagacttaagagaacaaagtgctaaagaactagtcagtcttgattttccagggtatgcaataggagggctgtctgtaggtgagccaaaacctgttatgtatgacatggttgaacatacagaacaatttatgccgaaagataaacctagatatttaatgggagtaggttctcctgatgctttgattgaatgtagcattaggggcatggatatgtttgattgtgtattacctactagaattgctagaaatggtacttgtatgacatcaaatggtcgattagttgttaaaaatgctaaatatgcagatgatttaagaccacttgatgaacaatgtgactgttatacatgtcaacattacacaagagcttatattagacatctagttaaagcggaagagacttttggtatacgtcttactactattcataatttacattttctgctaaaattaatggaagatattagacaagccattcgagaagaccgtcttttagattttaaagatgaattctttgaacaatatggattaaatgtagaaaaccctaaaaacttttaa

SEQ ID NO: 6797 - DNA, 1026 bp, Staphylococcus epidermidis
ttgaatatcgaagatttcgattatcatttgccagagtctctcattgcacaaacaccactaaaaaacagagaccaaagtagattgttagttcttagcaaagatactggtgagctggcacacttacattttagagatgtcatccattattttgagcctggtgatacattggttcttaatgatacacgtgttatgcctgctagattatttggcctaaaagaagaaactggtgctaaagttgaaatgctaatgctcacccaaattgaaggtaatgattgggaagttttacttaaacctgcaaagagaattaaaaaaggtcatcgtctaaattttggagatggtaaaatcgttgctgagtgtattgaggaacttgaacagggcgggcgtattatgcgtctacattatgagggtatactccaagaacgcttagatgaattaggcgagatgccattacctccatatattaaagaaagattagatgatcctgataggtatcaaacggtttatgctaaagagagtggatcagcagctgcaccaacagcgggtttacattttactgatgatttgctaaataaaattaaacaaaaaggggttcatatcacttttattacattgcatgttggattaggaacctttagacccgtaagtgttgaaaatatctatgatcacgaaatgcatagtgagtattatcaaatgacacaagaaacggctgatttattaaataaaacaaaagaaagtgggaagcgtgtgatatcagttggaacaacatcaacgcgtacattagaaacgatacgtcgtgatcatcctcaatttgttgccacaagtggatggactgatatctttatttatcctggctttgagtttaaagcgatagatgggttaattactaatttccacttacctaaatcaacgttagtcatgctagtatcagcatttagcagtaaaaaatatattttaaacgcttatcataaagctgttgaaatggagtatcgattctttagttttggagatgcaatgttaattatataa

SEQ ID NO: 6798 - DNA, 1005 bp, Staphylococcus epidermidis
atgaataaaagaatggtcgatcaagaatttcataatgaagatactgacttggaattatcactaagaccaacacaattaaagcagtatataggtcaatcctctataaaaagtaatttagaagtctttatcaaggctgccaaacttagacaagagccactcgatcatgtcttgttatttggtcctccaggactaggtaaaacgacgctatcaaatatcattgctaatgagatggaggtaaatattcgtaccatctcaggaccatctttagaaagaccaggtgacttagcagcgatattatctgggttacagccaggtgatgtgttatttatcgatgaaattcatagattaagtagtgttgttgaagaagttctgtatcctgctatggaagattttttcttagacatcatcatcggtaaaggcgatgaagcaagaagtattcgaatagatttgccgccatttacattagttggagcaacgacaagagccggtagtttaacggggccattaagagatcgttttggtgtgcatcttagattagagtattataatgaaaatgatttaaaggaaataatcacgcgaactgcagaggtcttaggaacggacatcgataaggaaagcgccttagaattagctcgtcgttctagaggtacacctaggatagcgaataggttactaaaacgtgtaagagacttccaacaagtaaatgaagacgatcagatatatattgaaacgactaaacgagcattacaattactgcaggtcgaccaacacggtttagattacattgaccataaaatgatgaattgtattattaatcagtacaatggtggtcctgttggattagatacaattgcagtttcaataggtgaagaacgagtgactatagaagatgtatatgaacctttcttaatccaaagaggtttcttggaaaggactccacgtgggagaaaagcaactgctttagcctatgaacactttaatactactaacgaaaagagggaataa

SEQ ID NO: 6799 - DNA, 603 bp, Staphylococcus epidermidis
atgtatgcatatattaaaggaacattatctcagttgttccctacacatgtagtggttgagacatgtggcataggttatgagatacaaacgcctaattcctatcgttttcaaaaatatcttgaaaaagaagtccaaatttatacttcactaattgtacgagaagatgctcaactactatatggctttattaatgaagaggaaaaagaaatgtttcttagcttaataaaagtgactgggataggacctaaatcagctttagcgatacttgcttcaagtacaccacatgaagttaaattggctatcgaaaatgaaaatgatgcttatttaacacaatttcctgggataggaaagaaaactgcaagacaaattgtgttagatttaaaagggaaggttacaattactgaagaaaatagtgacgatttattacaaactcaagttaatggtaatgaacaaaaccaaataatatctgaagcactattagctttacaagcactgggctattctaaacgagaattaaccaaagtagaaaaatccctaaacaaacataatgtgaatagtgtggatgaagccgttaaaataggactacaaacactagtttcttaa

SEQ ID NO: 6800 - DNA, 456 bp, Staphylococcus epidermidis
ttggacaataaagacaatcgaaaattttatttaattagagaagatgtactaccagaatctgtcatcaaaactttaaaagttaaggatgctttaaaaaataattcgaatttgtccatttatgatgctgtaaaacaattcaatctctctagaagtgcattttacaaatatagagagacaatatttccagtagatgaaaaaatattagatcaaagagaatttactttgattttatatgtaaatgatattgttggaatgttagcccaagttcttaattcaatctctcaacttcaattatcagtgttgacaatacatcaaagtgttccaattgaagataaagcgacaatcacactatctttaaatgcgagaaattctaatttatccattgatgaggtcattgaatcattaagagagataaatcatgtaactaaagtagacttaataagtatgactatgtaa

SEQ ID NO: 6801 - DNA, 1293 bp, Staphylococcus epidermidis
atgttcgtcgatcaagtgaaaatatctctaaaagctggtgatggaggtaatggcatcactgcttacagaagagaaaaatatgtaccttttggtggtccagctggtggcgacggtggtaaaggtgcttctgtggtatttgaagtggatgaaggattgagaactttattagatttcagatatcaaagacattttaaagctaaaaaaggcgaaaatggtcaaagtagcaacatgcatggtagaaatgcggaagacttagtgttaaaagtaccaccaggtacaattattaaaagtgttgaaagtgaagaagtgcttgcagatttggttgaagatggccaacgtgctattgtagctagaggaggacgcggcgggcgtggtaactcaagatttgctacccctagaaatcctgcgccagattttagtgaaaatggtgagccaggcgaagaattagaagtgactttagagttgaaattgttagcagatgttggattagttggttttcctagtgtgggtaaatctacattgctttcaatagtttctaaagcgaaacctaagataggtgcttatcactttacgacaataaaacctaatctaggtgttgtttcaactcctgatcatagaagttttgttatggcagatttaccaggattaattgagggcgcttctgatggtgtcggccttggacatcaattcttaagacatgttgaacgaactaaagtgattgttcatatgattgatatgagtgggtcagaaggtcgaaacccattagacgattataaaattattaatcaagaattaatcaattataaacaacgtttagaagatcgtccacaaattatagtcgcaaataaaatggatttacctgattcacaagggaatttatcgcattttaaggaacaattagataacgatgtgacagttgttcctgtttcaactattacgagagacaatattgatcaattattatatcaaattgccgataagctcgaggaagttaaagatgttgacttctcagttgaagaagatgagaatttaggtgttaatcgtgtattatataaacacacaccatcagcagataaatttactatttctagagatgatgacggcgcatatgtagtgagtggcaatgctattgaaagaatgtttaaaatgactgattttaatagtgatccagctgtaagaagattcgcaagacaaatgcggtcaatgggtattgatgatgctttaagagagagaggttgtagcaatggtgatattgttagaatcttaggcggagaatttgaatttgtcgaatag

SEQ ID NO: 6802 - DNA, 285 bp, Staphylococcus epidermidis
atgttaaaattaaacttacaattcttcgcatctaaaaaaggggtaagttctacaaaaaacggacgtgactctgagtctaaacgtttaggtgcaaaacgtgctgatggtcaatacgtatcaggtggttctatcctttatcgccaacgtggtactaaaatctaccctggtgaaaatgtaggtcgtggtggcgatgatacattattcgctaaaatcgacggcgttgttaagtttgaacgcaaaggtcgcgacaaaaagcaagtttctgtatacgcagttgctgaataa

SEQ ID NO: 6803 - DNA, 321 bp, Staphylococcus epidermidis; identical to SEQ ID NO: 2841

SEQ ID NO: 6804 - DNA, 309 bp, Staphylococcus epidermidis; identical to SEQ ID NO: 2842

SEQ ID NO: 6805 - DNA, 522 bp, Staphylococcus epidermidis; identical to SEQ ID NO: 2843

SEQ ID NO: 6806 - DNA, 840 bp, Staphylococcus epidermidis; identical to SEQ ID NO: 2844

SEQ ID NO: 6807 - DNA, 141 bp, Staphylococcus epidermidis; identical to SEQ ID NO: 2845

SEQ ID NO: 6808 - DNA, 486 bp, Staphylococcus epidermidis; identical to SEQ ID NO: 2846

SEQ ID NO: 6809 - DNA, 180 bp, Staphylococcus epidermidis; identical to SEQ ID NO: 2847

SEQ ID NO: 6810 - DNA, 681 bp, Staphylococcus epidermidis; identical to SEQ ID NO: 2848

SEQ ID NO: 6811 - DNA, 711 bp, Staphylococcus epidermidis; identical to SEQ ID NO: 2849

SEQ ID NO: 6812 - DNA, 1266 bp, Staphylococcus epidermidis
atgaattacctagacagcttgtattggatacacgaaagatctaaatttggtatcaaacctggcgtcaaacgtatggaatggatgctagaacaattaaataatccccaacataaaattagaggtattcatgtgggtggaacaaatggtaaaggttcaactgttgcatacttgagaaccgcattaattgagaacgattactcagttggaacatttacctcaccatttattgaaagtttcaatgaacgtattagtttaaacggtgtaccaattatgaacgatgaaattgttcaattagttgaacgagttaaacctgttagtgaagccttagagatagaaacagatttaggtggggctactgaatttgagattataacaacaatgatgttcctttattttggtgagataaatcctgttgattttgtgataattgaagcaggtttaggaattaaaaatgattcgacgaatgtttttaaacctgtgctatccatactcacaagtataggacttgaccatacagatatcttaggaacaacttatttagatattgcaaaagataaggcagctataattaaaccacatataccgattgtttatgctgtaaaaaatgacgatgctttaaagtatgtgagagattatgcgcttgaacagaacgcaaaaccaattgaattggatcgggagattaccgttgtctcccaagatgatgagttcacatatcggtataaagattatgaattagaaactatcattcttaatatgttaggggaacatcaaaaggaaaatgcagcacttgctattactgctctcattgaattaaatgaaagacaaatcatagaattagattttaataaaatgatagacggtatagaatctgtgaattggacaggtagaatagaacaagtaaaagaacaaccattaatggttattgatggtgctcataataatgaaagtattgatgcgttagtagacacaataagacattattatggaagagaaaaaattgatattttattttctgcaattaaaggaaagccaattcatagtatgattaacaaattaaatgatattgcatcaaaattctatatagcagattttgagtttccaaaagcattagctaaagaagaaattgccgaagaattgaaattagataatttacatttaattgatgattatgttgattttattgaaaattacgaaggtgatgggctgattattactggaagtttatacttcatcagcgaggtaaaagcaaaaattaattttaattaa

SEQ ID NO: 6813 - DNA, 2631 bp, Staphylococcus epidermidis
atggaaatgaaaccaaaatatgatccaagagaagttgaaaagggtcgttatgaggaatgggtaagtaaaggttactttaaaccatctgaagataaatctaaagaggcatatacaattgtaattccgccccctaatgtaacaggtaaattacatttaggtcatgcatgggatactactttacaagatataataactagaatgaaaagaatgcaaggatacgatactttatatctgcctggtatggatcatgctggtatagcaactcaagcaaaggttgaagcaaaacttaatgaacaaggtatatctagacacgacttaggaagagaaaaatttttacagcaagcatgggattggaaagaagagtatgcaacatttattagacaacaatgggctaaacttggtttagggttagattatagtagagaacgctttacgttagatgatggtttaagtaaagcagtaagaaaagtatttgttgatttatataataaaggtattatttatcgtggtgaaagaattattaactgggaccctaaagctagaacagctttatcagatattgaagtcattcatgaagatgtccaaggtgctttttatcattttaaatatccttatgctgatgggaatggatatatagaaatagctactacacgtcctgagactatgttaggtgacactgctatcgttgtaaatccaaatgacgaaaggtataaagatgtgattggtaaaacagttatattacctattgtaggaagagagttacctattttagctgatgaatacgttgatattgaatttggttcaggagcgatgaaagttactccggcacatgatcctaatgactttgaaattggtcaaagacatcaattagaaaatattatagtcatggatgaatatggtaagatgaacgataaagctgataaatacaaagggatggatagatttgattgtagaaatcagcttgttaaagacttaaaagaacaagatcttgttataaaaattgaagaacatacacattcagtaggacattctgaacgttctggtgcaatagtagaaccttatttgtctacacaatggtttgtaaaaatgaaacctttggcacaaagagctttggataatcaaaatacaaaagatagaattgactttttcccaggtagatttgaaaatacattcaatcgctggatggaagaaattagagattggacgatttcgcgtcaactatggtggggccaccaaatacctgcttggtatcataaagatacaggtgaagtctttgttggtgaagaagcacctgaagacatcgagaattggatacaagatgaggatgtattagatacatggttctcaagtgcactttggccgttttcaacattaggatggcctgatacaaatgctgatgattttaaacgttattatccgacaaatgcattagttactggttatgatatcattttcttctgggtagcccgtatgattttccaaggattagaatttactgatagaagaccatttaatgatgtattactccacggtttagtcagagctgaagatgggcgtaaaatgagtaaatcattaggtaatggcgttgatcctatggatgttattgacgagtatggcgctgatagtctacgttactttttagcaacaggatcttcaccaggtcatgacttgagatattctactgaaaaagttgaatcagtttggaattttattaataaaatatggaatgctgctcgctttagtttaatgaatattggtgaagattttaaagtcgaagatatagacctaagtggtaatttgtcattagcagatcaatggatattgactagattaaatgaaacgatatctacagtaaccgaattaagtgataaatacgaatttggtgaagtaggtcgtgcgctttataatttcatttgggatgagttctgcgattggtatattgaaatgagcaagatacctatgaatggcgaggacgaatctcaaaagcaaacgacgcgatcagtacttagttatgttttagataaaattatgaaaatgttacatccatttatgccttttgtgacagaaacaatttggcaaagtcttccacatcatggagaaacaattgtaaaagctaactggccaactgttgatcaagcattaatctttaatgaaagtaaacaaacaatggaacaattagttgaaattattaaatctgtccgtcaatcaagagttgaagttaacacaccgttatctaaagcaataccgattttaattcaaactaaagatgaaaagattaaacatacacttatggataacataagttacctacacaaattctgtaatccaagtcaattgactattgatactgagattgaaattccagaaaaagctatgacatctgtagtagttgctggtaaggtagttttgccattagaaggtcttattgatatggacaaagaaattgctcgacttgaaaaagaattagataaattacaaagcgagttagatagagtagataaaaagttatccaacgagaattttgtaaataaagcaccagaaaaaataattaatgaagaaaaagaaaaacaacaacattatcaagaaaaatataatggtgttaaatctagaattgaacaattaaatgcatag

SEQ ID NO: 6814 - DNA, 561 bp, Staphylococcus epidermidis; identical to SEQ ID NO: 2852

SEQ ID NO: 6815 - DNA, 1068 bp, Staphylococcus epidermidis
ttgaagcggaattttattaataatttaatcatattattaattgctattatgttaagtctgttattaaaaatgttacatgtgattttgccatttatgtttggaccaatattagcggcgttattatgtgtaaaagtattaaaattaaaaatacgatggccattttggttgagtcaaattggtttaatactacttggagttcaaattggctctaccttcacacaacaagtgattaaagacataagtaaaaattggctaactatcgtttttgtcactatcctactaattttattagctttgataattgcattcttttttaagaaaattgcacaagtaaatttagaaactgcaattttaagtgttataccaggtgcgctaagccaaatgttagtgatggcagaagaaaataagaaagcaaatatattagttgtgagtttaacacagacatcacgtgtaatatttgttgttattttagtaccacttatttcgtatttttttcaggataaccatcatgaaatgaatcatactacaatggaagtacccacactttctcagactttaaatatatggcaaataatcatcttattctcaatggtgggaatcatctatataggaatgtcaaaaattaacttccccactaaacaattattagcacctataatagttttaattatatggaatatgacaacacatttaacattttcactagatcattggttgttagccacagcgcaacttatttatatgatacgtattggattacagattgccaacttaatgagtgatttaaagggaagaattgcaatagcaatagcctttcaaaatataatgctcatagtcacaacgtttataatgataataggaatacatttgattactaatgaatccatcaatgaattgtttttaggagcagcaccaggaggtatgagtcaaatagttttagtggctatggctactggagctgatgtagcgatgatttcaagctatcacatttttagaatattttttatattatttgtcattgcgccactaattggttattttattaatgttaaattaaataataaatga

SEQ ID NO: 6816 - DNA, 1287 bp, Staphylococcus epidermidis
atgatgagttttgaaaaatctattaaagcaatggagcaagctgagaaattaatgcctggcggtgttaacagtcccgtaagagcatttaaatcagtagacacaccagctatttttatggatcatggtgaaggatctaaaatatatgatattgatggaaatgaatacattgattatgtgctaagttggggcccattaattctgggacataaaaatcaacaagttatatccaaattacatgaagcagtagataaaggtacaagcttcggcgcttcaacacttcaagaaaataaacttgctgaacttgtgattgaccgtgtaccttcaattgaaaaagtaagaatggtttcctcaggaactgaagctactttagacacacttcgtttagctaggggttatacaggacgtaataaaattataaaatttgaagggtgttatcatggacacagtgattctttactgattaaagcaggatcaggtgttgcaacactaggtttacctgattcaccaggcgtccctgaaggtattgctaaaaacactatcacggtgccatataatgatttagattcacttaaattagcgttcgaaaaatatggcgatgatattgctggtgttattgttgaaccggttgctggaaatatgggggtagtgcctccagtgaatggatttctacaaggtttaagagatattactactgaatatggagcattacttatatttgatgaagtgatgactggtttccgtgtaggttataattgtgcgcaaggatactttggtgtaacacctgatttaacttgcttaggaaaagtgataggtggaggtttacccgttggagcttttggtggtaaaaaagaaattatggattacattgctcctgttgggactatttatcaagctggcacactttcaggtaatcctttagcaatgactagtggttatgaaacattgagtcaacttactcctgaatcttatgagtattttaattctctaggagatatacttgaaaaaggattaaaagaggtatttgctaagcataatgttccaatcacagtaaatcgcgctggttcaatgattggttacttcttaaatgaggggcctgtaacaaattttgaggaagcaaataaaagtgatttaaaattatttagtaatatgtatagagaaatggctaaggaaggtgttttcctaccaccttcacaatttgaaggaacatttttatcaactgcacatactaaagatgatattgagaaaactatccaagcatttgataatgcattaagtcgtattgtgtga

SEQ ID NO: 6817 - DNA, 975 bp, Staphylococcus epidermidis
atgaaatttgatagacatagaagattgcgttcatctaagacaatgcgtgatttagtaagagaaactcatgttagaaaagaagatttaatatatccaatatttgtagttgagcaagatgatataaaaagtgaaattaaatcactaccaggcgtataccaaattagtttaaatttattgcatgaagagattaaagaggcatatgatttaggtattagagcaatcatgttcttcggtgtgccaaatgacaaagacgacattggatctggtgcatatgatcataatggagttgttcaagaagcgacacgaatatctaagaatttatataaggatttacttattgttgcagatacttgtctttgtgaatacacagaccacggacactgtggcgttattgacgatcatacgcatgatgtagacaatgataaatcacttccattacttgtaaaaacagctatttctcaagttgaagctggagctgacatcattgctccaagtaatatgatggatggttttgttgctgaaattcgtgaaggccttgatcaagcgggatatcaaaatattcctatcatgagttatggtattaaatatgcatcaagctttttcggtccattcagagatgctgcagattcagcaccttcttttggggatagaaaaacctatcaaatggatcctgcaaaccgtttagaggcattaagagaattggaaagtgatcttaaagaaggttgcgatatgatgatagttaaaccatctttaagttatctagatattattagagatataaaaaataatacgaacgtgccagtcgtagcatacaacgttagtggagaatatagtatgacaaaagcagcagcgctaaatggttggatagatgaagagaaaattgttatggaacaaatgatatctatgaaacgtgcaggtgctgatttaataattacttattttgcaaaagatatctgtcgttatttagataaatag

SEQ ID NO: 6818 - DNA, 681 bp, Staphylococcus epidermidis
atgaaaccagttatagttatgacgcagacgaatgaagttcatagtcatttagttgatattatccataagccttttatccaactaaaacaacttcattttaatgaaaaattgcttgatcatagctacgactggcttattttttcgtctaaaaacgcagtaaaatacttttatccttatttaaaaaacgttaaagttaaaaaggtagctgttataggtgataagacagctcagtattgtaatgaattaggtattagtgtcgactttgtgccacgtgatttttctcaagaaggctttttggacgagtttaagattagcgaacaacatttattattgccctcaagtgaaaaagcacgtcctaaattagttcaacaattgagcaaatataatgaagtcgttaaaattgatttatatagaccagtaccgaattttaaaaatataagtcaagttaagtctcttgttagaaaacatcaaatagacgcagtgactttttctagttcctctgcagttgaattttatttcaaagaggacaatgtgcctgaatttgatcattattttgctatcggtaagcaaactgctaggaccattttaaaattcaatacatctgtaaaagtggcaaataaacaaacattagattcacttattgataaaataatagaaagtagggaacaaaatgaaatttga

SEQ ID NO: 6819 - DNA, 927 bp, Staphylococcus epidermidis; identical to SEQ ID NO: 4578

SEQ ID NO: 6820 - DNA, 813 bp, Staphylococcus epidermidis; identical to SEQ ID NO: 4577

SEQ ID NO: 6821 - DNA, 1347 bp, Staphylococcus epidermidis; identical to SEQ ID NO: 4576

SEQ ID NO: 6822 - DNA, 588 bp, Staphylococcus epidermidis
atgaatataaattttaataatattaacttaattataagtgctgtaaaaaaagcacagtatcctgacactggattaacagaagtagcattaagtggacgctcaaatgtagggaaatctacatttattaatagtatgattgggcgtaaaaatatggcgagaacgtcacaacaacctggtaagacacagacattgaatttctataatatagatgaacaacttatttttgttgatgtaccaggatatggatacgctaaagtaagtaaagttcaacgagaaaaatttggtaaaatgattgaagaatatattacacaacgagagaatttaaaacttgttattcaacttgtcgatttaagacatcaacctactgaagatgatgtgcttatgtacaattatcttaaacattttgatataccaacacttgtaatatgtactaaagaagataaaattgccaaaggaaaagtacaaaagcatatcaaaagaataaaagacaaattagaattagaatctggagataatattataagttattcttcaattaaaaatagtaaacagcaagaaatttggaactttattgaaacatatatataa

SEQ ID NO: 6823 - DNA, 1263 bp, Staphylococcus epidermidis; identical to SEQ ID NO: 4574

SEQ ID NO: 6824 - DNA, 1302 bp, Staphylococcus epidermidis
atgacagcaacttgggaaaaaaaggaaggtaatgaaggcgttttaactgttactgttcctgcagagaaagtaaataaagcattagatcaagcatttaaaaaagtggtcaaacaaattaatgtgcctggattccgtaaaggtaaagtgcctcgtccaatttttgagcaacgttttggtgtagaagcactttatcaagatgcagtggatattttattacctgaagcttatggtgaagcaattgaagaaacagaaattaatccagttgcacaaccagaagttaatgtaactcaaatcgaaaaaggtaaagatttcatttttgaagctacagttacagttgaacctgaagttaaattaggtgattacaaaggattagaaattgaaaagcaagaaactgacctttctgatgaagaattacaagaatcaatcgaccatagcttaagtcaccttgctgaaatggttgttaaagaagatggtgctgttgaaaacggtgacacagtaaacattgatttctcaggttcagttgatggtgaagaatttgatggtggacaagctgaaggttatgacctagaaattggttctggatcattcattcctggctttgaagaacaaatagaaggaatgaaaactggcgatgaaaaagatgtagttgtaacattcccagaagaataccacgctgaagaattagctggtaaagaagctacatttaaaacaaaagtcaacgaaattaaattcaaagatgtaccagaattaaatgatgagattgctaacgaattagattctgatgctgaaaacgtggacgaatataaagaaaatcttcgcaaacgtttaagtgaacagaaagcaactgaagctgaaaatactgaaaaagaagaagctattaataaagcaacagaaaatgcttcaattgatattcctgaagcaatgattaatactgaattagatcgtatgattcaagaatttggtcaaagaatccaacaacaaggcttagatttgcaaacatattatcaaatctctggtcaaaacgaagagcaactaagagaccaaatgaaagacgatgcagaacaacgcgttaaaacaaacttaacgttaactgcgattgctgatgaagaaaatattgaagtatctgatgaagatattgataaagaattagaaaaaatgagcgagcaatttaacatttctgtagaagatattaaatctactttaggtaatacagatattgttaaaaatgatgtacgcattcaaaaagttattgatttattaagagataacgcgaaatatgttgaagctactaaagaagactag

SEQ ID NO: 6825 - DNA, 924 bp, Staphylococcus epidermidis
atggctgatattataccttttccacagtctaaaagtaaaatgattaagcaaataaatgatgcagaaagaaatgcagattttgaaaagatgtatcaattgtttaatgtatatgaacagcatttcgaccttaacgaggagattgcactaaagaaatgccagatgcttttacaattgaatgcttatttagagttacgagaagaggcaattattttgttaaaacgtggattcaactgttatgacgaattgatgatatattatattaaaagtctgaatggcttaggtcaatttaatgaagcagttgaagtaattaatcaaattatcgatgaagttaaaaatcataaaaccagaatggaactttttccacttaaagaatatgcgatatcgagacttgatgaagatagaaaggcattgtcctcatctttatcagatttcggttcgcttaacacacgtgaacaaacttctttaatattacaacttattgataatggacattataattttaaagaatcagtagcgaatatactaatttctatggatttaccaaaaaatttagtgagcttaatgttggaatatttaagatttgctgaatattctcatacaattacaatccataaatatggtgaaactatcaatgtaaaccctaatcatttaagtggcattgagcatacgacgataaaagacaaggtcattcctgtcgtaatgaatagattagaagatggagcgttgcatattttaaaagaagcacaacatatgatgaataatcattctatactcatgtatcctatagatatagagtcgttatacactattgatgattggatagatgcatatgacgtttacttcaaacaattaattggtatagatataaatggctgtaacaatgatactttacaattcattaaatcattagataatgaaatgtaa

SEQ ID NO: 6826 - DNA, 612 bp, Staphylococcus epidermidis; identical to SEQ ID NO: 4571

SEQ ID NO: 6827 - DNA, 357 bp, Staphylococcus epidermidis; identical to SEQ ID NO: 4570

SEQ ID NO: 6828 - DNA, 201 bp, Staphylococcus epidermidis; identical to SEQ ID NO: 4569

SEQ ID NO: 6829 - DNA, 528 bp, Staphylococcus epidermidis; identical to SEQ ID NO: 4568

SEQ ID NO: 6830 - DNA, 1503 bp, Staphylococcus epidermidis
atgaaaaagaataataaacaaaatgacggtgttcaaagaggattaaaagatagacatatttcaatgattgccattgggggatgtataggaactggtctattcatgacttctggtggagctatacatgacgcaggtgcattgggtgctttgattgcctatgcagttattggagcgatggtgttctttctaatgacgtcgttaggggagatggcgacatatttgcctgtgtcaggttcatttagtacttatgctacacgctttgtcgatccttcactaggttttgctttaggatggaattattggttcaactgggtgataacagtagcagctgatgttactattgcagcgcaagttatacaatattggtcccctatgcaaggtataccagcttgggtctggagttgtattttccttattattattttcgcgcttaattctttatccgttagagtatatggagagagtgaatattggttcgcacttatcaaagtagttacagtcatcatatttataggaattggtatcttaactattttaggaattatgggtggagaatttgtaggatttgatacgtttacaaaaggagatgggccaatactaggtgggaatttaggaggtagcttgctatcaattcttggtgtatttctagtcgcgggcttctcattccaaggaactgaacttattggtattacagcaggtgaatctgaaaatccagaaagagcagttccaaaagcgattaaacaagtattttggcgtatacttttattttacattttagctattttcattattggtatgttgattccatatgatagtaaggcattaatgggcggtggtgatagtatagctacttcaccttttacattagtatttaagaatgctggattagcttttgctgcttcatttatgaatgctgttatattaacaagtgtattatcagcaggtaactcaggaatgtatgcttcaacaagaatgttatattcaatgagtaaagataaattagcttataattcttttggaaaaacaaataaaagtggcgtaccttatgtatctctaattgcaactggagtactagtcattcttattttcgcattgcaacatttaagtggagatgcatatgaatacattgtagctgctagcggaatgactggttttattgcttgggttggtatagcaatcagtcactttagatttagacgcgcatttgataaacaaaattatgataaatcaaaattaaaatataaagcgaagttattcccatttggtccgatttttgcaggtattttatgtgtaatagttatcattggacaagatgtagattttattaaaacaggtaactttgatatgaatagattttttataacttacatgggaatacctgtattcttaattttcttcttttatcataaatttagatataaaactaaaaagattcctctaaacaaagttgacttaaggcaagatgtttcgatggaagaagtaagacaccataaaaataattaa

SEQ ID NO: 6831 - DNA, 1938 bp, Staphylococcus epidermidis
atgaatcaaattaatattcaatttccagatggtaatacaaaagaatttgataaagggactactacagaagacatcgctcaatcaattagtccaggattaagaaaaaaagcagttgcgggaaaattcaatggtcaacttgtagatttaacacgccctttagaacaagatggagctattgaaattattactcctgggagtgaagaagcgttagaagtacttcgtcattcaacagctcatttaatggcacaagcattaaaacgtttatacggagacgttaaatttggagttggacctgtaatagaaggcggattctattatgattttgatatggatgataaggtttcatcggatgattttgataaaattgagaaaacaatgaaacaaattgtgaacgaaaatcataaaattgtaagagaagtagttagtaaagaaaaagcaaaagacttcttcaaggatgacccttataaattagaacttattgatgcaattcctgaagatgagagtgtaacactttatactcaaggtgaatttactgatttatgtcgaggtgtacacgtaccttctacttctaaaattaaagagttcaaactattatctacagctggtgcttattggcgtggaaatagtgataataaaatgttacaacgaatttatggtacagcattctttgacaaaaaagatttgaaagcacatctaaaaatgttggaagaacgtcgtgagcgtgatcatcgtaaaattggtaaagatttagaattgtttacaaacaatcaactcgttggtgctggtttaccattatggttaccaaatggtgctacaatacgtagggaaatagaacgttatattgtcgataaagaagtaagtatgggatacgatcatgtttacacaccagtattagccaatgttgatttatataaaacatctggtcactgggatcattatcaagaagatatgttcccagcaatgaagttagatgaagacgaagcaatggtcttaagaccaatgaactgtccacatcatatgatgatttataaaaacaaacctcattcttatcgcgaattacctatacgtattgctgaattgggtactatgcatcgttacgaagcaagtggtgcagtatcaggtttacaacgtgttcgaggaatgacattgaatgattcccatattttcgttagacctgatcaaattaaagaagaatttaaacgtgtagttaatatgattcaagatgtgtacaaagattttggttttgaagattatcgcttcagattgagttatagagatcctgaagataagcataagtactttgatgatgatgaaatgtgggaaaaagctgaatccatgcttaaagaagcatcagatgaattaggtttaacttatgaagaagctattggtgaggcagcattctatggacctaagttagatgttcaagtaaaaacagctatgggaaaagaagaaactctatcaacagcacaacttgattttcttttaccagaacgttttgacttaacgtacattggtcaagatggagaacaacatcgtcctgtagttatacaccgtggtgtagtttctactatggaacgttttgttgcatttttaacagaagaaacaaaaggtgcatttccaacttggttggcgcctatgcaagttgaaattattcctgtaaatgtagatttacattatgattatgcaagacttttacaagatgaactaaaatcgcaaggtgtccgcgttgaaattgatgatcgtaatgaaaaaatgggatataaaattcgtgaagctcaaatgaaaaaaataccttatcagattgttgtaggtgaccaagaagtagagaatcaagaagtaaatgtaagaaaatatggttctgaaaaacaagaatcagttgaaaaagatgaatttatttggaatgttattgatgaaatccgtttaaaaaagcatagataa

SEQ ID NO: 6832 - DNA, 921 bp, Staphylococcus epidermidis
atgaaaagtttcagaaatatcatgggcgattctcaaaatctagataaacgtatacaaaaaataaaacaaaatgtaatcaatgatactgacgttaaacattttcttgagaaaaatcgtagtaatataactaatgagatgatagacgaagatttaaatgttcttcaagagtataaagatcaacaaaaagtttatgatggacatcgctatgatgattgtccgaattttgtaaaaggacatgttcctgaactatatattgaaaatgaaagaatcaaaattagatatctaccttgcccgtgtaaaattaaacatgatgaggaacgatttgattcacaacttattacatctcaccatatgcaaagagatacacttcatgcaaagctcaaagatatttatatgaataatcgagagagacttgatgtagcaatggcagctgatcaaatctgtacagcaattactaacgatgaaaaagtaaaggggttatatttatatggtccttttggtacaggaaaatcattcatattgggtgctattgcaaatcaacttaaatcgcaaaagatttcatcaacaattgtatatttaccagaatttattcgcactttaaaaggtggctttaaagacggtagttttgagaaaaaattacaacgtgtgcgagaagctaatattttgatgttagatgatattggcgcagaagaagtcacaccgtgggtaagagatgaagtgattggtcctttattacattatagaatggtacatgaacttcctacattttttagttctaactttaattatagtgagcttgagcatcatctttcaataactagagatggcactgaaaagactaaagcagcacgaattattgaaagaattaagactttatcgacaccttattatttgactggtaaaaattttagaaacaattga

SEQ ID NO: 6833 - DNA, 1371 bp, Staphylococcus epidermidis; identical to SEQ ID NO: 4564

SEQ ID NO: 6834 - DNA, 471 bp, Staphylococcus epidermidis; identical to SEQ ID NO: 4563

SEQ ID NO: 6835 - DNA, 1026 bp, Staphylococcus epidermidis
atggcaacgaatattgcaattaacggtatgggtagaataggtagaatggtgttacgaatagcgctaaataataaaaatttaaatgttaaagcgattaacgctagttatccacctgaaacaattgcacatttacttaattatgatacgacgcatggagtttatgataaaaaagttgaaccgattgaaagtggtattaaagtgaatggacatgaaattaaattactttctgatcgcaatccagaaaatttaccatggaatgagatggatattgatgttgttatagaagcgacaggtaaatttaatcacggagataaagcagttgctcatattaatgcaggtgctaaaaaggtattactcactggaccgtctaaaggtggagacgttcaaatgattgttaaaggagtcaatgataatcaacttgatattgatacatacgatatttttagtaatgcatcttgtactactaattgtatcggtccagttgcaaaagtcctcaatgataaatttggaatcataaatggtctgatgacaactgttcatgcaataacaaatgatcaaaaaaatattgataatccacacaaagatttaagaagagcacgttcttgtaatgaaagtattattccaacgtcaacaggtgctgctaaagcacttaaagaagtattgcctgaagttgaaggtaaacttcatggaatggctttaagagtaccaacaaaaaatgtctctctcgttgatttagttgttgatttagaacagaatgttacagttacacaagttaatgatgcatttaaaaatgccgatttatcaggtgttcttgatgttgaagaagctcctttagtttctgtagactttaacacaaatcctcattcagcaattattgattctcaatctacgatggttatgggacaaaataaggtgaaagttatcgcttggtatgataacgaatggggttattcgaatagagttgttgaagtagctgacaaaattggacaattaattgatgataaagcaatggtaaaagccatttaa

SEQ ID NO: 6836 - DNA, 117 bp, Staphylococcus epidermidis
atgcataaagattataatatgactcaacttactttaccaaaggaaacttcagtacatattcccacacatgatatgtcacaatatgtgaatgatattgtaaaaaattccaagtactga

SEQ ID NO: 6837 - DNA, 612 bp, Staphylococcus epidermidis
atgtctaaagtgattgggataactggtggtattgccactggaaaatcaacagtttcagaattattaacagcatatgggtttaaaatcgtagatgctgatattgcttcacgcgaagcagttaaaaaaggctctaagggtcttgaacaagttaaagagatttttggggaagaagcaattgacgaaaatggtgagatgaatcgtcaatatgtaggagagatagtttttaatcatcctgacttacgcgaggctcttaatgaaatagttcatcctattgtaagagagataatggaacaagagaaaaacaattatctagaacatggatatcatgtaattatggatatcccattgttgtacgaaaatgaactacaagatactgtagatgaagtttgggtggtttatacatctgaaagtattcaaatcgatcgtttaatggagaggaataatttatcattagaagatgctaaagcacgtgtttatagtcaaatatctatagataaaaaaagtaggatggcagatcatgtgatagataatctaggtgataaattagaacttaaacagaatttacaaaaattacttgaagaagaagggtatattcaatcggagagtgaatag

SEQ ID NO: 6838 - DNA, 873 bp, Staphylococcus epidermidis
atgcctgaactacctgaagttgaacatgttaaaagaggtattgagccatttataaaaagtgcaaaaatagagaaagtaacttttgctaaaaatgtaattaacggtaagaataataaccgtgagacgatcataaaaggtatggaattagatacttttaaaaaacttactgaaggttatgttataaaaaaagttgaaagaagaagtaagtacattattttttatatagcggatcatgatgatgatagaatcttagttagtcatttaggtatggcaggggggttctttgttgttaataaccttgatgagataagtacaccgaattatcgaaagcattggcaagtcattttcgatttggataatgaacaaaaattagtctattctgatatcagacggtttggagaaattagaaatataatcaattttgatagttatccatctttattagaaatcgctccagaaccatttgaagaggtggcatttgaacactatttagaatgtttgacaatgaaaaaatataagaataaaccaataaaacaaacgattcttgatcatcgtgttatagcaggagctggaaatatctatgcctgtgaagctttattcagagctggtattactccggataaaattactaattcactcactaaacaagaaagaaaatccctcttttattatgttcgagaagttttagaagagggtataaaatatggaggtactagtatttcagattataggcatgcagatggtaaaactggacaaatgcaattacatttaaatgtatataaacaaaaaaagtgcaaggtttgtggtcattcgattgaaacaaaagtgatagctggtagaaatagtcatttttgcccaaactgtcagagataa

SEQ ID NO: 6839 - DNA, 2631 bp, Staphylococcus epidermidis
ttgaataaattagtattaatagatggtaatagtctaagctttagagcgttttatgctctccctttactttcaaaccatgcaggtattcatacaaatgcagtttacggctttgctatgctcttagaaaaaataattaaagaagaaaaaccgaatcattttttagttgcatttgatgcaggtaaaacgactttcagacattctaagtacagtgaatataaaggtggtcgtcaaaagactccacctgaattaagtgagcaatttccatatattcgtcaacttttagatgcgtatcatattaaaagatatgaacttgataattatgaagctgatgacattataggaacattaagtagacaagctgatgaagaagattttgaaaccattatcattacaggtgatagagacttaactcaattagccactgataatgttacaatatattatacaaaaaaaggtgttaccgacgttgatcattatacacctaaatttatagcagagaaatataatggtttagtgccgaaacaaattatcgatatgaaaggtctaatgggggatacctctgacaatattcctggcgttgctggtgtcggcgaaaagacggctattaaattacttaatcaatttgagtcagtagaaggggtctatgaacatattgaggaggtcactgcaaaaaaattaaaagaaaaactcatcaatagtaaagatgatgccttaatgagtaaagatttagcaacaatcaatgttcacagtccgattgaagtatcattagaagatacaaaattaactctacaagacgacactacagaaaaaattgaactatttaaaaagctagaatttaaacaactattagcagatatagacacatcctctacgaatgaagaagtcatagataaaacttttgaaattgagcaagactttcaaaatgtagatttgaatgatttaaacgaagcggtaatacattttgaactcgaaagcactaattatcttaaagacactattctcaagtttggtttttatacaaatcatcaacatgtagtgataaatgctgaggatgtaaaggattataaacatttagttcaatggcttgaagataaaaatacaactaaaattgtctatgatgcaaaaaaaacttatgtatctgctcatcgattagggattaatatagaaaatattgaatttgatgttatgttagcaagctatattattgacccatcacgttctattgatgacgttaaatctgtggtaagtttatatggacaaaattatgtaaaagataatattacaatatttgggaaaggtaagaaacatcatatacctgaagaaccaattctaaacgaacacattgcctctgtgacagaagctatagcagctgtaactccaaccatgaaatcacagttagaagattataatcaaattgaactgttgaaagatttagaattaccattagcaagaattttaagtgaaatggaagaaattggtatatataccgatatcaatgatttgaaagaaatggaattcgaaattcaaaaaaaattggatgtattaatatccaatattcatgagtcggctggtgaagcgtttaatatcaattctcctaagcaattaggtgttgttttatttgaaacattacaattgcctgtcattaagaagaccaaaacgggctattcaacagctgtagacgtattagaaaaactacaaggtgagcatcctattatagatgatattttagaatatagacaacttgctaagttgcaatctacgtatgtagagggattacaaaaagtaataagcaaagatcatagaattcacacacgttttaatcaaacgcttgctcaaactggtagattatcaagtatagatcctaatttacaaaatatacctatacgattagaagaaggaagaaagattagaaaggcctttaaaccaacttctaaagatagtgtgattttatctgctgattattcacaaattgagttacgtgtacttgctcatattacgcaagatgaaagtttaaaacatgcatttataaacggacatgatattcacactgcaacagcaatgaaagtatttaatgttgaatctgaccaggttgatagtttaatgagacgtcaagcaaaagctgttaactttggtattgtatacggtatcagcgattatggattgagtcagagcttgggtattactagaaaaaaagctaaagcatttattgatgattatttagctagttttccaggtgtaaaacaatatatgtcagacattgttaaagatgcaaaagcacaaggttatgtggaaacactacttcatcgtcgtcgatacattcctgatataacaagtagaaactttaatttaagaagttttgcagaaagaacagcaatgaatacacccatacaaggtagtgcagctgacataataaaattagcaatggttaaattcagtgaaaagattaaagaaactaaatatcatgctaagttattattacaagttcatgatgaactcatatttgaaataccaaaatcagaagtagaagattttagtaaatttgtagaagaaattatggaacaagcattagtgctcgatgtacctttaaaagtagattcgaattatggtgcaacatggtacgatgctaaataa

SEQ ID NO: 6840 - DNA, 1698 bp, Staphylococcus epidermidis
atgttgaagtttcatctgcgtttattactattaattagtactattacaatcattagttttattggtttaggcgctatcattcacaacacaatttatcaaacattaactggtaatcaaattaaaagcttagatagtgaagctcgtaattatgttaatctctttaataataataaagagaaagaaatcactaatatagctcataatgaaaaaaatatcatattaataaaagaaaaagataaagataaaattatttactcaagtggaaatattaaagatattgaccatagaattgataatgaagctaatccttcgaaattaatcaataaaaacacaaaactcggtatgcgttacacctataagaatacaatagatgataaaacaatatacataagtggaattaataatgaaattattgatttacaaaaggatttatggaaatacttgtctattgttggagtcattgtattatttacggtctatttagcaagtagaagtatcaatcgaacatatattagacctatcaatgaagtaacttatgctacatcacttctagcagatggatattaccatgttcgtgttccagaaagtaatgtgaaggaaactagggcattatttgtgactacgaatgacttagcacgacgattgcaaaaattaaacaatagtcaaaaaattcaatccaatagattaaaaactaccttagaaaatataccgagttcagtactgatgattgataaacatggagaaattgtagttgctaatcatgcttattatcaggtgtttaaccctgatcaaatggtagaaaataaaagttacattggtttcatagatgatagtattgaaaaattaattattgaaagttttagaactgaaaaagttatctatgaacaattagaagttgctattaataacgtacatactaaatatttcgatgtatcttgtatccccattttaactaaatctaaaaaaaatttacaaggtatggtggttgtgcttcatgacattactaatttgcagaaattagaaaaccttagaagggaatttgttgcaaatgtgtcacatgaactaaaaacaccgattacttcaatcaaaggttttgcagaaactctgattgaaggtgctaaaaatgatgaacaatcgcttgatatgtttttaaatattattttaaaagaatctaatagaatagagtcattggttacagacttattagatttatcacatattgaacagcaaaaagaacttgaaataaattacatgaatttatctgaattagctaataatataatagataatttgcaaacacaagcatacaataagagaatcaaaatacaatctgaaattgaaaaagatgtcatcattgaggcacatgaaaataaaatagcgcaagttattactaatttgttatcaaatgctataaattattcctcagaagataataaggtaatagtaagagtatatagaaatgacaataaagtttatttagagattcaagattatggtattggtataagtgaaacagatcaaaagcgtatatttgaacgtttctatcgtgtagataaagcgagaagtagagattcaggtggtacaggacttggtctgtctataacaaaacatattgttgaagcacataatggtagaatagacgtgaaaagtgaacctggcaaaggttcgatattcaaagttctatttaatgataattaa

SEQ ID NO: 6841 - DNA, 711 bp, Staphylococcus epidermidis
atgtcacaaaaaatattagtggttgatgatgagcaatccatcgtgaccttactaaaatataatttagaaacagcagggtatatagtcgaagtcgcttatgatggtgaagaggcattgaaaaaagttgaaacagaacaaccggaactaattgtattagacgttatgttgccaaaaaaagatggtatagaagtatgtaaaacaatcaggtctgataaaaatttagtaccgattttaatgttgacagcaaaggacgatgaatttgatcgagttttagggcttgaattaggtgccgatgactatatgacaaaaccattttcacctagagaggtagttgccagagttaaagcaatattaagacgttctcaatttgtaaatgaaattgagaaggaagatgttgatgatgaagatattatcattggttcaattagaattcgacctgaattttttgaagtctataaagaagatgaattattagaattgacgccaaaagaatttgaattgttattatatttaattgaaagacaaggaagagttattactcgagaacatatgttgaattcagtgtggaattatgaattcgctggagattctcgaattgttgatgtacatataagccacttaagagataaattggaagaaaatcctaagcaacctaaattgataaagactgtacgtggtttaggttataaactggagagacctaaagcttaa

SEQ ID NO: 6842 - DNA, 1269 bp, Staphylococcus epidermidis
atgtctgcagaaaaaataacacagagtaaagatggtttaaatgtacctaatgaacctattattccgtttattattggtgatggtattggaccagatatttggaaagcagctagccgagtaatcgatgctgctgttgaaaaagcgtataatggagaaaaacgtatagaatggaaagaagtcttagcaggtcaaaaagcttatgatgaaactggagaatggttgccacaagaaacgttagaaacaatcaaagaatatttaattgctgttaaaggtcctttaacaactccaattggtggtggaattcgttcattaaacgtagcactgagacaagagttagatttattcacttgtttacgtccggtacgttggttcaaaggtgttccttcaccagttaagcgacctgaagatgttgatatggttattttccgtgaaaataccgaagatatatacgcagggatagaatttaaacaaggtacatcagaagtaaaaaaagttatagatttcttacaaaatgaaatgggagcaactaatattcgtttccctgaaacttctggtattggtataaagccagtatctaaagaaggtacagaacgtctagtaagagcagctattcaatatgcacttgataataatcgtaaatcagtaactttagttcataaaggtaatattatgaaatttactgaaggttcatttaagcagtggggctatgatttagctcataatgaatttggtgataaagtgtttacatggcaacaatatgatgaaattgttgaacaaaagggtaaagatgctgcgaatgaagcacaaagtaaagctgaacaagaaggtaaaattattattaaagactctattgctgatatcttcttacaacaaatattaactcgtccagctgaacatgatgttgtggcaactatgaatttaaatggtgactatatctctgatgctcttgcagctcaagttggaggcattggtattgcgcctggtgctaacattaactatgaaactggacatgctatttttgaagcaacacatggtactgcacctaaatatgctggtttaaataaggttaatccgtcatcagaaattttaagttcagttttaatgcttgaacatttaggttggcaagaagccgcagataaaatcactgactctattgaggcaacaattgcttcaaaaatcgtaacatatgattttgcgcgtcttatggatggtgcaaaagaagtttcaacatctgattttgctgatgaactaattaagaatattagataa

SEQ ID NO: 6843 - DNA, 1122 bp, Staphylococcus epidermidis
atggcagaattaaaaagaggtttagaaggggttattgcagctgaaactaaaattagctcgataattgacagtcagttaacatatgcgggctatgatattgacgatctcgcagaaaacgcgcaatttgaagaaataatttttttactatggaattatagacttcctaatgaaaatgagttaagtgaattaaaagaaaaattatttgattatatgactcttaataatagagtatacaagcactttgaggagtatgtgacggatcatgtacatccaatgactgctctacgtacatcagtatcatatgtagctcattttgatccagaagcggaaaatgaatctgatgagaataaatatgatagagctattcgcattcaagctaaaatcgcttctttagtaacggctttcgctagagttagagacggtaaagaacctgtcaaacctaattctgaacttagttatgcagcaaatttcttatatatgttaaggggagaactaccaacagaagttgaagttgaagcatttaataaggcattaattttacatgctgatcatgaacttaacgcatctgcatttacggcacgttgcgcagtatcttcattatcagatatgtattcaggtgttgttgcagctattggttcattaaaaggaccattacatggtggtgcaaatgaacgagtgatgtcaatgcttaaagaaataggaagcattgataatgtagatcactatttagatgaaagatttgcaaataaagataaaattatgggctttggtcatcgtgtttataaagatggtgatccaagagctaaatatttaagagaaatgagccgtaaaatcactgaagaaacagggcaaagtgaactgtttgaaatgtcattagccattgagaagagaatgaaagaagaaaaaggacttattcctaatgtcgatttctttagtgctacagtctatcatagtatgaatattccacatgacttattcacaccaatatttgcagtaagtcgtacttctggctggattgctcatattttagagcaatatcgagacaatagaattatgcgaccaagagctaaatatataggtgagcaaaatcgtaaatatgtgcctattgaagaaagaccataa

SEQ ID NO: 6844 - DNA, 1359 bp, Staphylococcus epidermidis
atggctgagaatttacaaagagaattgagcaatagacatgttcaattaattgccatcggaggtgctataggaactggtctgttcctaggtgccggacaaactatcgcaatgactggtccctcaatattacttacttatattattatagggttcatgttatttatgttcatgcgtggattgggagaaattattattcaaaatacgaatttcaaatcttttgctgacgtgaccaacacatatataggaccgttcgcaggatttgtaacgggttggacttactggctatgttggattattactggtatggctgaagtgactgcagttgccaaatatataagtttttggttcccagacatacctaattggattagtgctttattctgtgtacttattctaatgtctttcaatttattaagtgcaaagttgtttggtgagcttgaattctggttcgcaatcattaaaatagttacaatcattgctttaatcgttataggtgtaatcatgattttattcgcattcaagacaccatttggtaacacaagtttaactcatttgtatcaacatggaatttttccaaaaggagcttctggattctttatgtcattccaaatggcattgttctcatttgttggtattgaaatgattggtgttactgcaggagagacaaaagatccagaaaaaactatacctaaagctatcaatagtgtacctattagaattttaatcttttatgttggtgcattagcagtcatcatgtccattattccatgggataaagtagatccagataatagtccattcgttagattgtttgcattaattggtataccgtttgcagcaggaataattaatttcgttgttttaacagctgctgcctcttcatgtaacagtggtattttctcaaacagcagaatgctttatggactttcaaaccaaaatcaagcgccaccaacatttgctagtactaataaacatggtgtgccacataaagcaatcattgcatcatcagctttattgttaattgcagcactactgaattacatattccctgatgcaacacttgtatttacttatgttactacgatttctacagtattgtttgttgtggtttgggcattaattattattgcttatattaactatagtcgtaaaaatccagaacttcataagaaagcgacatataaactaccaggcggtcaatacatgggataccttatacttattttctttgtttttgtatttgccttgttatttataaatgttgatacaagaagagcgatttactgcacgcctatttggtttattttattaggtttaatgtacttaagatacaaaaaagctgataaagaagcacgataa

SEQ ID NO: 6845 - DNA, 1758 bp, Staphylococcus epidermidis
atgagaaagactaaaattgtatgtacaataggaccagcttcagaatcagaggaaatgctcgaaaaactaatgaatgcaggaatgaacgttgcgcgtttaaatttctcacatggtagtcatgaagaacataaagcaagaattgatacaattcgtaaagttgctaaacgtttaaataaaacaattggcttgttattggatactaaagggccagaaattcgtactcacaatatgaaagatggacttattgttttagaaaaaggcaaagaagtcattgtaagcatgaatgaggttgaaggaacacctgaaaaattctctgtaacatatgaaaatctaatcaatgatgtcaatattggatcatatatactattagatgatggtttagttgaacttcaagtcaaagaaattaacaaagataaaggcgaagttaaatgtgatatcttaaatactggtgaattaaaaaataaaaaaggtgttaacttacctggtgttaaagttaatttacctggtatcactgataaagatgccgatgatatcagatttggtataaaggaaaatgtagactttatagctgcaagttttgtaagacgtccaagtgatgttttagatatccgtcaaattcttgaagaagaaaaagcagaaataacaattttccctaaaatcgaaaaccaagaaggtatcgataatattgaagaaattcttgaagtatctgatggattaatggtagcacgtggtgatatgggtgttgaaattccgccagaaagcgtaccaatggttcaaaaagatttaattagaaaatgtaataaattaggaaaacctgtaattactgcgactcaaatgcttgattctatgcaacgtaatccacgtgcgacacgtgcagaagcaagtgacgtagctaatgcaatatacgatggtactgacgcggtaatgttatcaggcgaaactgcagcaggtcaatatcctgaagaagctgttaaaactatgcgtaatattgcagtttctgctgaagcagcgcaagactataaaaaattattaagtgatcgtactaaattagttgaaacttcattagtaaatgcaattggtgtttctgttgcacatactgccttaaacttaaatgtaaaagctattgtagcagcaactgaaagtggttcaacagcacgtacgatttctaaatatcgtccacattcagatatcattgctgtaacacctagcgaaaaaactgctagacaatgtgcaattgtatggggagtaaatccggtcgttaaagaaggacgtaaaacaactgatgctttactaaataatgctgtagcaacagcagtagaaactggtagagtttcaaacggagatttaattattattactgctggtgtacctactggagaaaaaggaactacaaatatgatgaaaatccacttagtaggtgatgagattgctaaaggccaaggtgttggtagaggatctgttgtaggccatgcaattgtcgcagatagtgctagtgatttagaaggtaaagatttatctgataaagttattattacaaattctgttgatgaaacattagtaccatatgttgaaaaagctataggtctaattacagaagaaaatggtattacttcaccaagcgcaattataggtttagaaaaaggcatacctactgttgttggtgtagaacaagcaactaaagaaattaaaaatgatatgttagtgactttagatgcgtcacaaggtaaagtgtttgaaggttatgctaacgtcctttaa

SEQ ID NO: 6846 - DNA, 924 bp, Staphylococcus epidermidis
atgaacgctgctgttcgtgcagtgactcggacagcaatttacaataatattgaagtttatggtgtttatcaaggttaccaaggtttacttgatgatgatattcataagcttgaattgggttcagtaggggatacaattcaacgaggaggaactttcctcttttccgcaaggtgccctcagttcaaagaagaggatgtacgtaagaaagctattgagaatttacgtaagcgtggtatcgaaggtttagttgttattggaggagatggcagctatagaggggcacaacgaattagtgaggaatgtaaagaaattcaaacaattggtattcctggtacaattgataatgatattaatggtacagattttacaattggttttgatactgcattaaacactattattgaatcagtcgataagattagagatacggcatcaagtcacgcaagaacgtttattgttgaagttatggggcgtgattgtggagatttagctttatgggctggattatctgtaggtgctgaaacgattgttttaccagaagtcaatacagatattaaggatgtagctgaaaagattgaacagggtattaaaagagggaaaaaacattctatcgttatggttgcagaaggttgtatgagcggccaagaatgtgcagatgagttaacgaagtatattaacattgatacacgagtttcagtgttaggtcacattcaacgtggcggtagcccatctggtgctgatcgagtattagcttctcgacttggtggatatgctgttgaactattaaaacaaggcgagacagctaaaggtgttggcattagtaataatcaattaacctctacgccgtttgatgaaatttttgctgaaagtgatcgcaaatttaatagtcaaatgtatgaattagcaaaagaattatcaatttaa

SEQ ID NO: 6847 - DNA, 945 bp, Staphylococcus epidermidis
atgttagattttgaaaaaccactttttgaaattagaaataaaattgattctttaaaagaatcgcaagaaaaaaacgaagttgatcttcaagatgaaatagatatgctggaagcatcattaaaaagagaaactacaaaagtgtacactaatctaaaaccttgggatcgtgttcaaatcgctcgtttaccagaaagaccaaccacattagattatattccctatatttttgattcatttattgagttacatggcgatagaagttttagggatgatccagcaatgattggtggaattggttacttagatggtaagtcagtaacagttataggccaacaacgtggtaaagacacgaaagataatatttatcgtaattttggtatggctcacccagaagggtatagaaaagctttgcgtttaatgaaacaagcagagaaatttaatcgtccaatatttacttttatagatactaaaggtgcttatccgggtaaagcagctgaagaaagaggtcaaagtgaatcaattgcaaaaaatttgatggaaatggcttcattaacggtaccagttattgttgttgttattggtgaaggcggaagtggcggcgctttaggaattggaatctcaaatcgtgttctgatgcttgaaaatagtacttattcagttatttcacctgaaggagcagctgcacttttatggaaagatagtaacttagctcaaattgctgctgaaactatgaaaatcactgcgcatgatttactagatttaggtattatagatgaagtgattaatgagccacttggtggtgcgcaaaaagatgaagaagcacaagctttatcaattaagaaaatgttccttaaacatttaaatgaattaaagcaactcacacctgaagaattagcaaatgatcgttttgaaaaatttagaaaaattggttcagttgtggagtaa

SEQ ID NO: 6848 - DNA, 858 bp, Staphylococcus epidermidis
atgtttaaagatttttttaatcgaagtaagaaaaagaaatatttaacagttcaagattctaaacaaaatgatgtacctgctggtataatgacaaaatgtcctaaatgcaaaaaaataatgtatacaaaagaattgaatgaaaatttaaatgtatgctttaattgtgatcatcatatagctttaaccgcatataaaagaatagaagcaatttcagacgaaggatcatttatagaatttgatagaggtatgacatctgctaacccattagactttcctgggtatgaagaaaaaattgaaaaagatcagcagaagactggacttaatgaagcgttagtgtctggtactgcgaaattagacggaatacaatatggtgtcgcagttatggatgctcgttttagaatgggaagcatgggctctgtagttggtgaaaaaatatgtagaattattgattattgtacagaacatcgtttgccatttattctgttttctgcgagtggtggagctagaatgcaagagggaattatttctttaatgcaaatggggaaaacaagtgtttctttaaaaagacattctgatgcaggactattatatatttcttacataactaatcccactactggaggggtttctgcaagttttgcttcggttggagatattaatttaagtgaacctaaagcactaatcggatttgctggtagacgtgttatagaacaaacaattaatgaaaagttgcctgatgatttccaaactgctgagtttttattagagcatggtcaacttgataaagtcattcatcgaaaagatatgcgtgagactttatcaaatattttaaaaatccatcaagaggtgagtaactaa

SEQ ID NO: 6849 - DNA, 1230 bp, Staphylococcus epidermidis
atgtctttaagagatgacgctttagaaatgcatagagagaaccaaggtaaactagaaattacaccaaatgttaaagtgacaaataagcaacaattaagcctagcatactcacctggcgttgcagaaccttgtaaagaaatccatgaagattcaagaaaagtatatgagtacactattaaaggaaatacagttgctgttgtaacggatggaacagctgttctcggtttagggaatattggagcagaagcaagtattccagtaatggaaggaaaggcagcactgttcaaaagttttgcgggtattaatggtgtgccaatagctctagatacaactgacactcaagaaatcataaaaacagtaaaacttattgcaccaaactatggtggaattaatcttgaagatatatcagctccccgctgttttgaaattgaagaaaccttaaagaaagagaccaatatacctattttccacgacgatcaacatggtacagctattgttactatggctgggttaatcaatgctttaaaaattgtagataaagagttaacgaatataaaagttgtattaaatggtgcaggtgcagcaggtatcgctatagtgaagttacttcatgcttatggtgtgaataatatgattatgtgcgattcacaaggtgctatttattctggcagaaattttggtatgaatgatacaaaaacatatgtagctaagtggacgaataaagataaagttgaaggttcacttgaagaagtgattaaagatgcagatgtttttataggtgtatctgtagcggatatattaactcaagatatggtgaagacaatggctgatgatccaattatttttgctatggctaatcctaatcctgaaatcaatcccaatgaagccaaacaggcaggtgcaaaggttgtgggtacaggtcgatctgattttccaaaccaaattaataatgtattagcatttccaggtctttttagaggtgcattggatgttgaagccactcatattaacgaagatatgaaaaaggcagctgtagaagctatcgttcatttaatagacgaaaatgagttacatcctgattactgtataccaggaccgtttgataaaagagtagctccatcagtagccaaaaatgtagctaaagctgctatggaatccggtgtagcaagaattaaaattgatacacaagaaatatttgataaaactatgaaacttactgacttaaaatag

SEQ ID NO: 6850 - DNA, 3198 bp, Staphylococcus epidermidis
atggtagcacatttaaatattcatacttcttttgacctgttagattctagtttaagaattgatgcattaatagataaagctaaaaaagaaggatatcgtgcgcttgcaataaccgatacaaatgtattgtacggttatccaaagtttcatgatgcttgtattgcagctcacatacatccaatctttggtatgactatatatttaacggatggtctctatactattgaaacggttgttttagcaaaaaataatcaaggactcaagtcattatatcaaatttcttctgctataatgatgagaaataaagaagaagtgccaattgaatggctaaaaagatacgacgaacatttaattatcatatttaaagaggctgagttgtctcataagcaaattattgatgcttttgaaggtaagaaagaattatatttaaatcacaatagtaataatacattgactggcaaacgtgtatggatgcaatctgcaagatacttaaatgaagatgatgctgaaaccattccagcgttacatgccataagagataatactaagttagatttaatacatgagaaagaaacacttgatgaacattttcctagtatagaagaacttcaaacactaaatcttagtgaagatatgattactaacgcgaatgaaattgaagaattatgccaagcagaaattgcataccatcaatccctgttgccacaatttgtgacacctaatggtgaaacttcgaaagattatctttggacgatacttatacataggttacgagaatgggaacttaatgataaaacttatttcaatcggttgaaacatgaatataaaattattactgatatgggtttcgaggattattttcttattgtaagtgatttgattcattttgctaaaacacatgaagtgatggttgggccaggtcgtggttcatcagcagggtcattagtaagttatttattaggtattactactatagacccgttaaaatataatcttttatttgaaagatttcttaatcctgaacgcgtaactatgccagatattgatattgattttgaagacacgagacgtgaaaaagtaattaagtatgtacaagataaatatggtgaacatcatgtatcaggtattgtgacatttgggcatctgttagctcgtgctgttgctagagatgtaggaagaataatgggatttgatgaaacgagtttaaatgagatttcaaaacttattccacataaattaggtataactcttgaagaagcataccaaaagccagagtttaaagcatttgttcatcgtaatcatagaaatgaacgttggtttgaagtgagtaaaaagttagagggattaccaagacatacgtctacgcatgctgcaggtatcattatcaatgatcaaccattattcaaatttgccccattaacaactggtgatacaggattattaacgcagtggactatgacagaagcggaacgtataggattattaaaaattgatttcttgggattacgcaatctatcaattattcatcaaattattttacaagttaaaaaggatttaaatataaatattgatatagaagctataccttatgatgataaaaaagtttttgatttattatcaaacggtgacactacaggtatatttcaattggaatcagacggtgttagaagcgtattaaaaagattgcaacccgaacattttgaagatatcgtagctgtcacatcattatatagaccaggaccaatggaagaaataccaacttatataacccgtagacataatcctaaccaagttgcttatttacatccagatttagaaccaatcttaaaaaacacatatggtgttatcatttatcaagaacaaataatgctaatagcaagtcaagttgctggttttagttatggtgaagcagatattttaagaagggcaatgagtaaaaagaatcgtgcaatcttagaaagtgagcgtcaacatttcattgatggtgcaaaaaataacggttacggtgaacagataagtaagcaaatttttgatttaatacttaagtttgcagattatgggttcccacgtgcccatgctgttagttactcaaaaattgcatacattatgagctatttaaaagtgcactatcctcattatttttatgcaaatatcttgagtaatgtaatagtaagtgaaaaaaagactgcagctatgattgacgaagctaagcatcaaagaattagcatcttgcctcccaatattaatcaaagtcattggtattataaggcaagtaataaaggaatatatctgtctttaggtacaattaaaggaattggatatcaaagcgttaaattaattattgatgaacgtcagcagaatggaccttatagagatttctttgatttttcaagacgtataccaaaaagggtgaaaaatagaaaattacttgagtctcttatcttagtaggcgcattcgacacttttggcaaaactagagcgacattattacaagcaattgatcaagtattagatttgaattctgatgttgagcaagatgaaatgcttttcgatcttttaactcctaaacaatcgtatgaagaaaaagaggaactacctgatcaattattaagtgattatgaaaaagaatacctaggattctatattagtaaacatccagttgaaaagaaatttgaaaagaaacaatatttaggcatatttcaattgtctaatggaagtcactaccaacctatacttgttcaatttgaccatatcaaacaaataagaacgaagaatggtcaaaatatggcatttgtaacgatgaatgatggaagaacgatgatggatggagtgattttcccagataagtttaaaaaatacgaaacttctatttcaaaggaaaagatgtatatcgtattaggtaaatttgaaaagcgtaaccaacaaatgcaacttatcatcaatcaactttttgaagttgaagcgtatgagcaaacaaaattgtctaattcgaaaaaagttattttacgtaatgtaacacatctagaaccacaatttgaacattcaaaagtagaatctaatgaacaacatgcattaaatatttatggttttgacgaaagtgcaaataagatgacaatgttgggacaaattgaacgtcaacgtcaaaatttagatctattaatacaaacttattcgccagctgatattagatttatttaa

SEQ ID NO: 6851 - DNA, 939 bp, Staphylococcus epidermidis
atggaagtaaaaatgaatgaaataatggaagcattagaacaaagtgaattaattattattcacagacatctaagacctgatccagacgcatatggttcacaattaggtttgaaatattacttacaaaagaagtttccaaacaaacaaatttatgctgtaggagctaatgaagattctttgaaatttataggtttgatggacgaaattgacaatgatatatacaagaaagcgactgtagttgtatgtgatacggcaaatgcgccaagaatagatgaccaacgttatgatacaggtaccaaacttttaaaaattgatcatcatcctgctactgatcagtatggagatattaactatgttaataccaaagcttcttccactagtgaaataatttacgaattcatttcacatttcaatgatgaacatatcattgacgaacaagttgctagagtattatatcttggcatcgttggtgatactggacgttttttatttaataatacaacgccacgaacaatgcaaattgctggaaaattacttacatatccttttgatcacaaccaagaattaaacaaaatgtctgaaaaggatccaaaactattaccatttcaaggatatatattgcaaaattttgatttaaatgataaaggattttgcaaagttaaaataactaaagacatacttgaaaaatttcaaatacaacctaatgaagcgtctttatttgtaaatacaatcgcagatattcgaggattaaaaatatggatgtttggcgttgatgaaggagatcaaattagatgtcggttgcgttctaaaggtcatattattattaatgatgtcgctaatacatttggtggtggtggacatccaaatgcatctggagtttcagtaaatagttgggagcaattcgagcaactcgccgaagctttaaacgacaagttataa

SEQ ID NO: 6852 - DNA, 1299 bp, Staphylococcus epidermidis
atgacaaagaatgaacaaataattaaacatatcgaatctttatcaattggctctaaaatctctgtacgaaagattgctaaagatcttaatgtgtctgaaggtactgcgtatagagcaattaaagatgcgagtcaacttggaattgtagcaactattgacagagttggtactgttagaatcgagaaacgaagtagagaaaatttagataacttaacgtttaatgaaattgcaaatattgtcgagggtcaaatacttgccggtagagctggacttaataaatcagtttcaaaatttgcgataggagcaatgcaatttgatgatattctgaaatatataggcaaacacacattattaattgttggaaatagagaaaatgtacagattgaagctttaaaacgtgaaacttcaatactcatcacaggtggttttcgtccaagtgctgaaattatacgttatgcagatgagcatgaattaccaattatttcttcaagttatgatacattcttagttgctaatatcatcaataaagcaatgtttaatcaaaaaatacgcaaagaaatacttgtggttgaggatatagttaaaccaatcaatgaactatcagtgttatttgattcaatgacaatacatgattacaaaaaaatagcgaatgaaaccggccatacaaggtttcctatagtaaacgaagaatttaaattagtaggtatagtaactagtagagaaatcattaatatgaacgaagaagacctattaggtaaagttatgactaaaaatccattgagtgttaaattaacaaatacggttgctagttgtgcccatttattaatttgggaagggattgaattattaccagtaactgataataataaaaaagctgtcggtgtgattaacagacaggatgttttaaaatcaatgcaattattaggtagacaacctcaaattggtgaaacagtcaatgatcaaattgccaaacatatttcaatacatcaacaaggaataaatgtcgacgtatctccactcattacaaatcattacggtactctaagtaaagcagtatttgttggaattattgaggaaacgattcggcacgaaatgagaaagtataaaaaaggtaatgtcatgatagaaagtatgagtattatctatattaagactgtaccaattgaatctactattgaagtacattatgaaatgttagatgttggccgatattttgctaaattagaagttactatgatcaataatggtgaaaaagttgctaatgcattagtaatttgtcaaatgtttgatgggttttaa

SEQ ID NO: 6853 - DNA, 414 bp, Staphylococcus epidermidis
atgtataaacatattctacttggggtagatactcaaattaaaaatgagaaagctcttaaagaggtgtctcgtttagctggtgaaggaactatcgtcacagttttaaatgccattaatgagcaagatgctcaagcgtcaatcagagctggcgtacatttagataagctaaccgaaaagcgttctaaaggtttagaaagtacacttaaaactctagaagactacggcattgattatgatgaagttattgtaagaggcaatgctaaggatgagctattaaaatttgcaaatagtggtaaatatgaaattattgttctaagtaaccgaaaagctgaagaaaataagaaatttgttttaggtagcgtaagtcataaagtagctaaacgtgctactattcctgttttaattgttaaataa

SEQ ID NO: 6854 - DNA, 567 bp, Staphylococcus epidermidis
atgaaaaaagaatttaaggaatggttaatagccataatagtagctatattactattatttttagtaaataattttttatttaaaccttatactgtatcaggattatcaatgtatccaacgtttaacaataaagataaagtagtagtcagcaaaatatccaaatcattaaatcacttaaagtctggagatgttattgtatttcatcaaaatagcaataatgactttataaaacgattgattggtaaaccaggagatcaaattgaatataaaaatgacaagttatatatcaataaaaattatatcaaagaaccttaccttgactataataaaaaaatgaataactccagtgaaaatttaacagaagattttaatgtatcaaatataaagggatctaaaaataaaatgataatacctaaagataagtatttagttctcggagacaataggacaaacagtattgatagtagatattctgaggtggggttaatatctaaaaaacaaatcgtaggaaaagttattttaagattttggccttttaatgatatgaagtataattttaatcgatga

SEQ ID NO: 6855 - DNA, 366 bp, Staphylococcus epidermidis
atgaaatggttaaaaatcattatattaattttatctttagttccaatagaatttatcggattatttactgattatcaaacaggtttattaataggttacatcccatttataatagttgctatattaatgagtatatccatttttaaattcggctttaaaaataatataagtattgtaataggtagatgcattggaatatttctttcttgggaatgtgttcattggtttatgagccattatgagccggaattttactttgaaccttttatggctgacgattttgcattatttttaggagttattcatttcatagttattatgcttatatatttagctatctatggtttttctcatcgtaataagtaa

SEQ ID NO: 6856 - DNA, 189 bp, Staphylococcus epidermidis
atgatgggatatgctgaaaaagatattgtttttaaagatcaaccatatagtgagtatgagtataacgtgacgccagcaccagcaccatggacagatgataaagaatataaggtgtggggggaaacagatttacaaaagaaagactcctattataaatatcttttagaatcagaatcttacagaaaataa

SEQ ID NO: 6857 - DNA, 1365 bp, Staphylococcus epidermidis; identical to SEQ ID NO: 4106

SEQ ID NO: 6858 - DNA, 117 bp, Staphylococcus epidermidis
gtgacacttaccgttccatttctcaaccgctgtatcgctttaaatatcaatgaaactgtacttctaaagaaaaaatatgatcctataacagttaaaaataaaatagcaaaaggttga

SEQ ID NO: 6859 - DNA, 657 bp, Staphylococcus epidermidis
atgaacattgatgcaaaaatcctcaataaaatactggcaaaccgaatccagcagcacatcaaaaagcttatccaccatgatcaagtgggcttcatccctgggatgcaaggctggttcaatatatgcaaatcaataaatgtaatccagcatataaacacaaccaaagacaaaaaccacatgattatctcaataaatgcagaaaagccctttgacaaaattcaacaacccttcatgctaaaaactctcaataaattaggtattgatgggacgtatctcaaaataataagagctatttatgacaaacccacagccaatatcatactgaatgggcaaaaactggaagcattccctttgaaaactggcacaagacagggatgccctctctcaccactcctattcaacatagtattggaagttctggccagggcaatcaggcaggagaaggaaataaagggtattcaattaggaaaagaggaagtcaaattgtccctgtttgcagatgacatgattgtatatttagaaaaccccatcgtctcagcccaaaatctccttaagctgataagcaacttcagcaaagtctcaggatacaaaatcaatgtgcaaaaattacaagcattcctacacaccaagaaagacaaacagagagccaaatcatga

SEQ ID NO: 6860 - DNA, 405 bp, Staphylococcus epidermidis
atgagtgaactcccattcacaattgcttcaaagagaataaaatacctaggaatccaactcacaagggatgtgaaggacctcttcaaggagaaccacaaaccactgctcaatgaaataaaagaggatacaaacaaatggaagaacattccatgctcatgggtaggaagaatcaatatcatgaaaatggccatactgcccaaggtaatttatagattcaatgccatccccatcaagctagcaatgaatttcttcacagaattggaaaaaactactttaaagttcatatggaagcaaaaaagagcccgcattgccaagacaatcctcagcaaaaagaacaaagctggaggcatcatgttacccaacttcaaactatactacagggctaccataacaaaaacagtatag

SEQ ID NO: 6861 - DNA, 591 bp, Staphylococcus epidermidis
atgggcaagaacttcatgtctaaaacaccaaaagcaatggcaacaaaagccaaaattgacaaatgggatctaattaaactaaagagcttctgcacagcaaaagaaactatcatcagagtgaacaggcaacctacagaatgggagaaaatttttgcaatctactcatctgacaaagggctaatatccagaatctacaaagaactcaaacaaatttacaagaaaaaaataaacaaccccatcaaaaagtgggcaaaggatatgaacagacacttctcaaaagaagatatctatgcagccgacagacgcatgaaaaaatgctcatcattactggtcatcagagaaatgcaaatcaaaaccacaatgagataccatctcacaccagttagaatggcgatcattaaaaagtcaggaaacaacaggtgctggagaggatgtggagaaataggaacacttttacactgttggtgggactgtaaactagttcaaccattgtggaagtcagtgtggcgattcctcagggatctagaactggaaataccatttgacccagccagccatcccattactgggtatatacccaaaggattataa

SEQ ID NO: 6862 - DNA, 258 bp, Staphylococcus epidermidis; identical to SEQ ID NO: 4012

SEQ ID NO: 6863 - DNA, 267 bp, Staphylococcus epidermidis; identical to SEQ ID NO: 4013

SEQ ID NO: 6864 - DNA, 171 bp, Staphylococcus epidermidis; identical to SEQ ID NO: 4014

SEQ ID NO: 6865 - DNA, 924 bp, Staphylococcus epidermidis
atgaaaaaattttggggaattttattaattgtgatgtcaattgctcttgtgggatgttcgaatagcaatgattcagatcaatcttctaatgaaaagtcatcatcaaaaagttcggagaaaaaaacggatgtggcgactgaatatacaaaagaggacgaatataaagaactagaaaaagaagctaaggatcttaaacaaaagccagttcttaatgaaatcgatgcacttattacagaaaaaggttttacaaacaaaacgggattgcaaggctgggaagactataaaaaattagtggataaggtaacacttgcagattataaatacacaaaagaatctaaagggtcatctatagaagaagttaataagttctttaaagataaaaaaggtgtagagattaaacgaatgaaaagtaaggaaaaaaatattaagcatatcaattatatgtatgtagatccagatggtaaaaaaacaggtgaaaataagcaacctatgtcctacgctcaaatacttgcaacatttaaagaaggtaaattagtagctacaaatattcaacctggattttttgctttagacaaaaagaaaatggttaaagctaaagacttagaaaaagttaagacattggaagatttaacgcgtttgaaagatcctaaagcgacatcatatggtattttacagacgaaatataaagggaaaccatacactcaagtttcaatattaggcagtgattctgatgaagagaatgatatttcctcagccatcttagcttattatctattttcaccaacggaattagatagtgacgataatcataaatacgttgaagttgcatcagcgccattcttaagtgctcaaaacgatttttcatcttatcaactaggcgtatttaaaaaaattatcgaaagtagtatgtcgttcgatgaataa

SEQ ID NO: 6866 - DNA, 546 bp, Staphylococcus epidermidis
atgtttagttatcaaataaataaaaatattaaattaaaaatattagaagaacgagaagcagaattatttaaattagtagatagcaatcgtaactacttagcagagtttctaccttttgttaaatacacaaagaaggttgaagatagtaaacactttatccattcggcgttacaacaatttatcgatggtaatggatttcattgtggaatatggagtaataaagaattgattggagtcataggattgcattacttagatttagttaataaaacaacttcaattggttattatttagctgaagactttcaaaagaaaggtattatgactaaatgtactaaagcgttaattcgctatgtatatgaagtgtatgatattaatcgtatagaaatacgaatgtctactaaaaataagaaaagcagagctataccaattagacttgggttcacgcaagaaggtatattgagaagtaatgaacgattacaaggggaattctcagatagttatgtttttagcttgttgagggaagaatgtacgtatactagataa

SEQ ID NO: 6867 - DNA, 465 bp, Staphylococcus epidermidis
atgagtaatatcacagtttataatgtcattgaattgggcgtaaacaatcttttagccgattatgacaattggaatgttgaagaagtattagataaagaaactcaacatttcccaaacactttacattggcaatatggtcatgtattaacaatctttgaacaagcattatcattaggcaatcaacatgtcgtagatgttgaaaaatataataaattgtttggatatggttcaaatcctagagactggaagggacaagatgtacctgctatcaacgaaatcaaacaacacattcaaacattaccagaacgtgctaaaaaattaacacacgagcagttagctcaaaaattagaccaacctatcgcaggttgtaacacacttgatgaattattaatgttaaatgctatccatgtgccattacacaccggtaaaattgaagaaatgacacgtgtacttcgtgaaaaataa

SEQ ID NO: 6868 - DNA, 231 bp, Staphylococcus epidermidis; identical to SEQ ID NO: 4100

SEQ ID NO: 6869 - DNA, 639 bp, Staphylococcus epidermidis
atgaaaggtcttactcttagtatattttatacagctaaaaaatcatttttcatctatttagtagtcggaattattgctgcagtcgttttctcatttttaaatccaacgatgaacagctttcttgctatcatttttttaatatctcctattacggataacttcaaacgtgaaaaggactcaagatggatgaattacatatccacacttcctgttagaagagctgattatgttaaaagttattatactatttttctcttgtgtgcattagttgggatacttgcaggtgtacctagtgtcggtctaatcacacaaagtttaagtatggtattcatttcactatgtgttgccattggtggcgcagggactttctccattatgtttcctctaacattcaaattcggttctgaaaattcaaatgtcattgtgatgactacaacatttgctgtcattattatctatttcttattctatatcgcatcaatgatattgagtaatcaaacaggaagtggctctatgattacaatgctgagcaacacacaaagctatgttgtatattctatttatggaatacttggattgatttcaattattatctcttatattttatcgattaaaatttttaacaaacaagaactataa

SEQ ID NO: 6870 - DNA, 843 bp, Staphylococcus epidermidis
atggaaaacttattagaagttcagcaactcaataaatcatataagaattcagaatttcagcttactgacatcacattctctgttaaacctggcgaggtagtgggtttaattgggaaaaatggttcaggtaagtctaccctcattaatacacttgtaggaaatagacataaagataatggttcactgaaattcttcgataaagaggtgacagagaacgacttcaaatataaagaacatttaggtgtagtttttgatgatttacgtgttccagataaattaactctacaatatatcaataaagtttttactgaaatatatgatgcttggaacagcgatacattcttttctttaatcaaagcatttgaactaccaacaaataatcaaattaagacattctcaagaggaatgcgtatgaaagcagctttaacaattgctttaagccatgatgctaaattattaatcttagatgaagctacagcaggtatggacgtatcaggacgtgaacatgtgttagaaattctagaggattatttaggagacgatcgtgccatattaatttcatcacatatttctgaagatattgaacagctagctactcagctcgtttttatgcgtgatggtcgaattattttaaaagaaagtaaagaagttttattgagccaatacggcatcatcgatcaaccagttgagcatttcaatatttcaaatgagtatctaatcgcaacgcgcagacgtaatgatcgacaaatcagtttagtgaataactatcaaaaagtacctgatgcacaaccactaaagacaatcgatgatgcaactaaaattattatgcgaggtgaagtataa

SEQ ID NO: 6871 - DNA, 735 bp, Staphylococcus epidermidis
ttgaaaataaaaaggtatgcacttctatgtttattaggaggattagttggaggcatcatcggatacatcataggagctattaactgggagaagttatttaattatgcacagttcgctaactttaaagttgtgctttatacaaccatcgtagcatcattaataaatgttatacttactgtgtatttatttatagtccaaaacgcgtcacttcactataaagctaaaattgacgcaaatatttcagatgatttagcagatacatatgaaaataaatcatacatcaaatcattgaaagtaagatttatttacacaatgcaattaattgtcgcttttattgcaattttaatacccgtcataggaaattcatctgagaatcacattgctctaataatgattcctttctttattacaatcatttcatccataatgattgggatattttatagaaaatttgatgctcgataccctaaattaggagagaaacattacactgaaaaagcatttaatattatggacgaaggagagcgatacatcacactcgtttccttgtataaagtgcaccagcagaatattgtattactttttataggaattatgatgttgggaatattctcaataactacaggcatgaatcaatcgctaggcataattttgtttatcattttatttatctataattcattgggatatttactgaaagtcagtaatttttataaatcagaacagaaatcctaa

SEQ ID NO: 6872 - DNA, 204 bp, Staphylococcus epidermidis; identical to SEQ ID NO: 4096

SEQ ID NO: 6873 - DNA, 201 bp, Staphylococcus epidermidis
ttgagcttttatcgttttatgaagaattttgaaggtgaaaaaagtcattttggagatttgtttgaaggtatgaaagatattaattttcctgaaaacattacgaccccaagggaaattatggaaaagttccaacattggttacaagaacctagtttacacgatacgatacaagatgcgattaagcagtatcaaaataaataa

SEQ ID NO: 6874 - DNA, 147 bp, Staphylococcus epidermidis
gtgtttactgcaattaaagtatgtaatactcatttaaatacaatgaaggtaagagataaactcttaaataatagatttgaatatccaaatataatgacaataagaaaagaaggtttgcttcttccctcattttttagaaaagtataa

SEQ ID NO: 6875 - DNA, 1185 bp, Staphylococcus epidermidis
atgtcacgcatagtattagctgaagcatatcgaacacctataggcgtgtttggtggtgcatttaaggatatacctgcctatgaactaggtgcaacagttattcgtcaaattttagaacatagtcaaatagatcctaatgaaatcaatgaagttattctaggaaacgtattacaggcaggtcaaggacaaaatcctgctcgtattgctgcgattcatggtggtgtgccagaagcggtaccttcttttactgtaaataaagtttgcggttctggattaaaagcgattcaacttgcctatcaatctattgtagcgggagataatgagattgttatcgctggaggcatggaaagtatgtctcaatctccaatgcttcttaaaaatagtcgtttcggttttaaaatgggaaatcaaactttagaagatagtatgatagctgatggtttaactgataagtttaatgattaccatatgggtatcacagccgaaaatctagttgaacagtatcagattagtcgtaaagaacaagatcaatttgcattcgattctcaacaaaaagcatcacgtgcacaacaagctggtgtatttgatgctgaaattgtacctgtagaggtaccacaacgtaaaggcgaccccctaattatttctcaagatgaaggcattcgacctcaaacgacaattgataagttagcacaactccgtccagcatttaaaaaagatggatcagtaactgctggtaatgcatccggtatcaatgacggtgctgctgctatgctcgttatgacggaggacaaagcgaaagcattgggcttacaacctatagctgtattagatagttttggtgcgagtggtgtggcgccttcaattatgggtattggtccagttgaagcgatacataaagctttaaaacgttctaataaagtgataaatgatgttgatatttttgaattaaacgaagcttttgcagcgcaatcaattgctgtaaaccgtgagttgcaattaccgcaagataaagtcaatgttaatggtggtgcgattgcactaggacatccgataggggcttcgggtgcgcgtactttagtttcattattacatcaattaagtgatgctaagccaacaggtgtggcatctttatgtatcggtggcggtcaaggtatcgctacggttgtatctaaatatgaagtttaa

SEQ ID NO: 6876 - DNA, 744 bp, Staphylococcus epidermidis
atgtcacagtatccactttggaatcaattaaatactttaaaagaggctcagtgggtcgatttaacacatactttcgacccaaatatccctcgttttagcgaatttgaaaaaggtgaagtctcaacgctattcaatgttaaagatcatgggttttatgtacaacgttggagtatcgtaactcaatatggaacacacattgatgctccaatccatttcgttgaaaatagaagatatttagaagaattagatttaaaagaacttgttttaccattaattgttttagattattctaaagaagctgcacaaaattcagattttatcgtatcacgtaaacatttagaagattgggaacaacaacacggtcgcattgaagcaggtacttttgtcgcattacgtactgattggtcaaaacgttggccagatatagaaaaatttgaaaataaagatgtagatggccatcaacatcttccaggttggggccttgatgcattaaaatttctcattgaagaacgtggtgttaaatccataggtcacgaaacatttgatactgatgcctcaattgatacagctaaaaatggtgatattgttggcgaaagatatatcttaggtcaagacacattccaagtcgaattacttaccaatttagatcaattacctaccagaggtgcaattatctatgcaatcagcccaaaaccaaaagatgcaccaggctttccagttcgtgcattcgcaataaaaccttaa

SEQ ID NO: 6877 - DNA, 2247 bp, Staphylococcus epidermidis
atgacaacaattaaaacttcaaacttaggattcccaagattaggtagaaaaagagaatggaaaaaagcaatcgaaaattattgggcacataaaattgacaaagcagaactagatcaaacactgactgatttacacaaagaaaatcttttacttcagaaaaattatcatcttgatagcattccagttggggatttctctttatatgatcatattttagatacgtctttattgttcaatattatccctgaacgtttccaaggacgcgaagtcaatgatgatttattatttgatattgctcgtggtaacaaagagcatgttgcaagtgcacttattaaatggtttaacaccaactatcactacattgtacctgaatgggacaacgtagaacctaaagttgaaaaaaatacgttattagaacgttttaaatatgcacaatcaattaatgtaaatgcgcatcctgtaattgttggtcctatcacatttgtaaagttatcaaagggtggtcatcaatcgttcgaggaaaaagttgaaacattacttcctttatataaagaagttttacagtcacttgtagatgcaggtgcaaagtatattcaaattgacgagcctattctagtgactgatgacagcgaaagttatgaagacattactagaaaagcatacgactatttcgcaaatgaaggtttaggaaaatatctcgttattcaaacttactttgaacgtgttcacttaaaattcttaagttcattaccagtgggcggtttaggattagatttggtacacgataacggctataacttaaaacaaattgaagatggtgatttcgatcaaagtaaagcactttatgcaggaatcattgatggccgaaatgtatgggcggctgatattgaagcaaaaaaacaattaatcgaaacattacaacaacacacacaacagttagtcattcaaccttcatcatcacttctacatgttccagtatcactagatgatgaaacacttgatgaatctattgcagaaggattaagttttgctactgaaaagttagatgaattagatgcattgcgtcgtttattcaatgataatgacctgtcaaaatatgaacattacaaagcacgttatgaacgcttccaaagccaatcatttaaaaatcttgaatacgattttgaaagtgtaccgacacatcgtaaatcaccatttgctaaacgcaagcaattacaaaaccaacgtctaaatttaccagatttacctacgactacgattggttcattccctcaaactcgtgaagtccgtaaatttagagcagattggaaaaataatcgcattacagacgctgagtatcaagaatttttacaaaatgaaatcgctcgttggattaaaatccaagaagatattggtttagacgtacttgtacacggtgagtttgagcgtaacgacatggttgaattttttggggaaaaacttcaaggtttcctagtaacaaaattcggttgggtacagtcttacggttctcgtgcagttaaaccaccagttatatatggagatgtgaagtggactgccccacttactgtaaaagaaacagtatacgcgcaaagcttaactgacaaaccagtaaaaggtatgcttacaggtccagttactattttaaactggtcatttgaacgcgtagacgtacctagaaaggttgttcaagatcaaattgccttagccattgatgaagaagtgttagctttagaagaagcaggtatcaaagtcattcaagttgacgaaccagcgttgcgtgaaggcttacctctacgctctgaatatcacgaacaatatttagaagatgctgtacattcatttaaattagcgacatcatctgtgcatgatgaaacacaaattcatacacatatgtgctattctcaatttggacaaatcattcatgctatccatgatttagatgcagatgttatttctattgaaacttctcgtagtcacggagacttaattcaagatttcgaagatattaattatgatttaggaattggattaggtgtttacgatattcacagtccacgtattccaaccgaagaagagattactactgcaattaatcgttcattacaacaaattgatcgttctctattctgggttaacccagactgtggtctaaaaacacgtaaagaaaatgaagtgaaagatgcattaacagtgttagtcaatgcagttaaaaagaaacgtcaagaatctgaatcaacaacagcataa

SEQ ID NO: 6878 - DNA, 1839 bp, Staphylococcus epidermidis
atgagtcatttactgaaccaattaaagagcaacgttttagtagctgatggcgctattggaacaatattctactcggaaggtcttgatacttgtccggaagcatacaatcttactcatccagataaggtcgagcggattcatcgttcttatatcgaagctggtgcagacgtcattcaaacgaatacgtatggtgctaactttgaaaaattaaagtcctttggtcttgaacataaagttaaagaaattcaccaagctgcagttcaaattgctaaacgtgcagcaaatgaggacacaattatacttggaacggtaggtggattcagaggcgtccggcaagaggatatcagtctttcaacaattcaatatcatacagaacttcaaatcgatacattaattgatgaaggtgtagatgcccttctatttgaaacttattacgatttagatgaattaactcgcatcgtcactgctacacgacaaaaatacgatattccaatcatcgctcaactcaccgcttcaaatacgaattacttagttgatggcactgaaattaatgccgcattgaaatacgtagttgaatgtggcgccaatgtagttggattaaattgtcaccatggcccacaccatatgcaacgatcattttcacatatagaacttcctaaacatgcgtatttatcgtgttatccaaacgctagtttattagatatcgagaatagtgaattcaaatatagtgataatgctcaatatttcggagatatagctcaagaattaattaatgagggagtcagattgataggtggttgttgtggtacaacacctgaacatattcgctatattaaatcagcagttaaacatttaaaacccgttaaagataaaaaggtaatccctattaataaagcttcatctcaaaagcaaacgcgagttcttaaacaaaaccttacttctaaagttaaaaatggcccaacagtcatcgtagaacttgatacacctaaacatttggatactgatacatttttcgataatgtaggcaaattagatgaagctggcatagatgctgttacattggcggataattcattagctaccgtaagagtgagtaacatcgcagcggcaagtttaattaaacaacgctacgatattgagcctcttgtacatgtaacatgtcgtgaccgtaatttaataggattacagtctcatctcctaggtttatcactcattggtgtcaatgaaatactagctattaccggagatccttctaaagtaggccatttgcctggagctacaaatgtctatgacgtgaactcaaaaggccttacagaacttgcactaagatttaacaaaggtattaacactgacggcgatgcgctgaaaaaacatactaactttaacatcgctggtgcgtttgatcctaacgtacgaaaattagatggagccattaaacgacttgaaaagaaagtagcaagtggcatgagttatttcataactcaacccgtttatagtaaagaaaaaattattcaagtatatgaagaaacaaaacatttaaatacacctttcttcataggtatcatgccaatcgcaagttataacaacgcacttttcttacataatgaagtgcctggcatcaaaatgtcagacgatgtacttaaccaattcaaagctgttaaagatgataaagaaaagactaaagaattaagtttaagactttccaaagaactcattgatacagtacatgaatacttcaacggtctgtacattattacacctttccaaaaggtagattattcattggaactcgcagcatactctaaatcaatcactgccaacaaggaggcaatattatga

SEQ ID NO: 6879 - DNA, 1176 bp, Staphylococcus epidermidis
atgagtttatctaaagaaacagaagtaatattcgatgtgcgtagaggtaatgactacgactcagctaacccgccactttacgattcatctacattccatcaaaaagtgttaggcggtgagactcaatatgattatgcacgaagtggtaaccctaaccgaactttacttgaagagaaacttgcacgtttagaaggtggtaaatatggatttgcttatgcttcaggcattgctgcaatttcagccgttttactcacattaaacgcaggggatcatgttattttacctgatgatgtttacgggggcacatttagattaactgaacaaatactcaatcgattcaatattgaatttactacagttaacgctacacatatagatcatatcactgaagctattcaatcaaacacaaaactcatctatgtagagacgccttcaaatccacttttcaaaattacagatattcatgctgtagcaacgctagcaaaggaacataagatactattagctgttgataatacgtttatgacacctttgggtcaatcacctttagcactaggcgctgacatagttattcatagtgcaactaaatttctaggtggacatagcgatttaattgcaggtgcagcaattactaataatagagaggttgcaaatgcattgtacttattacagaacggcacgggcacagccctttctgcatatgatagttgggcacttgcaaaacatcttaaaacattaccagttcgttttaaacaatctgttcataatgctgaacgccttgttcaatttttgagtcaaagagaggagatttctgaggtgtattacccgggaaataatcttacacatctcaagcaagcttcaactggaggtgcagtgataggtttccgacttaaagatgaatctaaagcacaaaagttcgtcgattctcttactttaccacttgtatcagtgagtctcggtggtgtagaaactatcctatcacatcccgcaacaatgtctcatgcagcagtgccagaagatgtgagacgtgaacgtggcatcactttcgggttattccgtttaagtgtaggtcttgagaattcagaagaactcatcgcagattttaactacgctttaaaggaggctttcaatgagtcatttactgaaccaattaaagagcaacgttttagtagctga

SEQ ID NO: 6880 - DNA, 1104 bp, Staphylococcus epidermidis
atgaaggatacagatttagctcaaattgctttaacacaagatcacactggcgcaattgccaatccaatatatttatctactgcatatcagcatcctcacctaggtgaatcaacaggctatgattatacacgaacgaaaaatccaacaagaacagcctttgaagaagcttttgcacaacttgaaaaaggcattgcttcatttgctacttccagtggtatggcggcgattcagttaatatgtaatatattcaaaccaggtgatgaaattctcgttgcatttgacctatatggtggaacatttcggttattcgatttttacgaaaaacaatatggtttgaagtttaaatatgtagactttttaaattatgaagaagtggaaaaaaacatcactccacaaactagagcattatttattgaaccaatctcaaatccacaaatgattgaaattgatgtagaaccatattatatccttagcaaaaaacatcaactattaacaattatcgacaacacttttttaacaccttatctttcgacaccactcgaagaaggtgcagatatcgttctgcattcagcaacaaaatatattggcggacataacgatgtgttagctggagttgtaactgttaaggatgctcaattagctgaacaattgaatcaattccataatatgattggagcaactctatcacctcttgatagttatcttttacaaagaggtctaaagacattacatcttcgcatagagcgttcccaagaaaatgctcaaaaacttgcacaacgatgtcgccagtcagattcaattgatgaagttttatatagtggacgaacaggcatgcttagtttaagactgaaccaagcatatagcgtcgctaaatttttagaaaatttagaaatttgtatatttgcagaaagcttaggtggtacagaaacatttatcaccttcccttatacacaaacacacgttgatatgccagatgaggaaaaagacaaacgtggcattgatgaatatctcatcagattgtccgtaggtatagaagattataacgatatagaagctgacataattcaagcattagagaattctaaagtaggagtgatttcatga

SEQ ID NO: 6881 - DNA, 843 bp, Staphylococcus epidermidis
atggcatatacagatgatcagaggttgaaaatgaataatgatgatagtgtgcaatttattgcactagaattaattagacctaatccttatcagccacgtaagacgtttgaagaagaacgactcaatgatttagcttcatcaattcaacaacatggtatattacagcctattgtattacgtcaaactgttcaaggttactatattgttgtgggtgagcgacgatttagagcatctcagttggcgggattaacagaagtgccagctattattaaagaactatctgatgaagatatgatggaattggcaattattgaaaatttacagagagaagatttaaatgccattgaagaagcagaaagttataaaaaaatgatgacagatttgaatattacacaacaagaggttgcgagacgattaggtaagtcacgtccttatattgccaatatgcttaggttattacagttacctaaaaatgttgctcaaatggttcaacaaggagcgttatcaagtgctcatgggcgtacgttattaactttgaaagacgccagtaaaataaaaaagacggcaaaacaagccgctcaggagtcttggagtgtaaggtatttagaggagtacgtcaatggtttagtcagtaaagacatctcaatgaaactggacagagagaccaagggaagtaaaccgaaaatgattcaacagcaggaaagatttttaaaaaagcaatatggtgcgaaagtagatatttcgacatctaaaaatgtcgggaaaatcacgtttgaatttaaatctgaagcagaattcaaacgcttgattcgtcaacttaataaagattataaggaatattaa

SEQ ID NO: 6882 - DNA, 876 bp, Staphylococcus epidermidis
atgaatcaacttaaacatattttatcttcattgttcgaacctttaacaaaggttgaaacatatgaaaatttaattactaaagtaataatgattttaatttatatccttgtagcgattgttgttatagcaattttgaataagattattgagcaagcatttaaaattcaaaataaaagcaaaaaaggaaataaaaaacgttcaaaaacactgatttctcttgtacaaaacatagtaaaatatatcgtatggtttgttgttatcacaacaattttaagtaagtttggtattagcgtcgaaggtatcatcgctagtgctggagttgtaggtattgcggttggtttcggtgcgcaaacgatagtaaaagatattattacaggtttctttattatctttgaaaatcaatttgatgtgggtgactatgttaaaatcaatagttcaggaactacggtagcagaaggtactgtgaaatctattggtttaagatcaacgcgaattaatacaatttcgggagaactgactattttacctaatggtagcatgggggaaattacgaacttttcaattacaaatgggactgctattgtagaactaccagtatcagttgatgaaaatatagatcaagttgaaaagaaactcaatcgtttatttgtttctttacgcagtaaatattacttatttgtcagcgatccagttgttgatggcattgatgcgatagaatctaataaggttactatacgaatttcagcggaaacaattcccggtgaaggattttcaggcgctcgtattattcgtaaggaagctcaaaaaatgtttagacaagaaggtattcgcatgccacaaccagtcatttcaaattataatgaagaaaaaagctaa

SEQ ID NO: 6883 - DNA, 204 bp, Staphylococcus epidermidis; identical to SEQ ID NO: 4085

SEQ ID NO: 6884 - DNA, 1098 bp, Staphylococcus epidermidis
atggctttaacagcaggtatcgtaggtttgcctaacgtaggtaagtctaccctatttaatgcaattactaaagctggcgcattagcagcaaactatcccttcgcaacgattgatcccaatgttggtatcgttgaagtgccagattcacgtttaataaaattagaagaaatggttcaacctaaaaaaacaattcctacaacttttgagtttactgatattgcaggtattgttaaaggtgcatctaagggcgaaggtttaggaaataaattcctttcacatattcgtgaagtagatgctatatgtcaggtggttcgtgcgtttgacgatgagaatgtaacacatgtatcagggcgtgttaatccgcttgatgacatagaagtcattaatatggaacttgttttagcagatttagaatctgttgaaaaacgtttaccgaaaatagagaagatggctcgtcaaaaagataaaacagctgagatggaattacgtatattaacacaaattaaagaagcgttagaagacggtaaaccagtacgcagtattgatttcaatgaggatgatcaaaagtgggttaatcaagctcagttattaacatctaagaaaatgttatacattgctaatgttggtgaagatgaaattggagataaagataatgataaagtgaaagcaattcgtgaatatgcagcaaacgaagattcagaagttatcgttattagtgcaaaaatcgaggaagaaatcgctacattagatgatgaagataaagaaatgttcttagaagatttaggcatcgaagaaccaggtttagacagactcattagaacaacatatgatttgttaggtttatctacttactttactgccggtgtgcaagaagtgcgcgcttggacatttaaacaaggaatgactgcaccacaatgtgctggaattattcacactgattttgaacgtggttttattcgtgcagaggtaacaagctatgaagattatgtacaacatggtggagaaaatggtgctaaagaagcgggaagacaacgtttagaaggtaaagattacatcatgcaagatggggatattgttcatttccgttttaatgtttaa

SEQ ID NO: 6885 - DNA, 192 bp, Staphylococcus epidermidis; identical to SEQ ID NO: 4083

SEQ ID NO: 6886 - DNA, 813 bp, Staphylococcus epidermidis
atgttaaagaaattttcttactcaatcatttcactttcaattttcgctactagccttaattttatagatactcaagcacaagcgtcttcatcttctgtaagcgaaaaaggtacaatggggtatggctatcaacaatacttaaaagaccatcctaaaaagcaacctcataaaacacaaaatcgttctactttctctgctgaatctaatattactgaaacaaataatggtgaaagagtcttagatatttctgaatggcaaggacttttaactaatgaacaaataaaacaactaaagaaaaattatgattttattattttaagagcacagtacggttcagaatacgttgataagacttttgaaaaaaatgcagaattattagaacaaaataaaatgaaatacggcgtgtactcttatagcatgtacaaaagtccaaaagatgcacgttatgaagctaacactttatctcaacgcgcgcccccaaaagccgccttttacatcaatgattatgaagaacaaaccgttaaatccggagatgatgaaacagcgacacaagcatgggcaaacgaaatgagaaagcttgctggaaacaagaagatccttttttattcatatgaaaacttcatgttaaatcatgcatcaaatgctgtcagttcatatgatggctactggttagcagcatatcaagctgaggaaccaaaccgagagaaagtgctatggcaatatacaaatagttactactctcctgaattaaatcaaaatgtcgatgcaaattatattgacgaaaatgtgaattcgtcttggttcacttcataa

SEQ ID NO: 6887 - DNA, 297 bp, Staphylococcus epidermidis; identical to SEQ ID NO: 4081

SEQ ID NO: 6888 - DNA, 510 bp, Staphylococcus epidermidis
atgttaaatcgagttgtattagtaggtcgtctaacgaaagatccagaatacagaaccacaccctcaggcgtaagtgtagcgacatttactctagcagttaatcgtactttcacgaatgctcaaggggaacgcgaagctgactttattaactgtgtagtcttccgtagacaagcagaaaatgtaaataactacttgtctaaaggtagtttagctggcgttgatggtcgcatacaatcacgtagttatgaaaatcaagaaggtcgtcgtatttttgttactgaagtcgtatgtgatagtgttcagttccttgaacctaaaaacgcacaacatggtggccaacgttcacagaacaataatttccaagactacggtcaaggatttggtggtcagcaatcaggacaaaatacatcttataacaacaataattcatcaaactcaaatcagtcggataatccgtttgcaaatgctaatggaccgattgatatcagtgatgatgatttaccattctaa

SEQ ID NO: 6889 - DNA, 243 bp, Staphylococcus epidermidis; identical to SEQ ID NO: 4079

SEQ ID NO: 6890 - DNA, 1008 bp, Staphylococcus epidermidis
atggaaagaaaaaagcctaaaactactgatggtttgatgaggcatatcagagataataaaaacattcagataggtggtagtaaagaaaaaatccagttacgaaacatcggttattttcatggatttaaaggatataatttctttttgaacaaagaagaggagcttaattttgaagaattcagcgagttacaagctttgtacaatttcgatacagaaatcaaaagtcttttctataaacatgttatgttttgcgaaactgctattaaaaatagactgttagaaatagtttgcttaaactccggatttgatttagataatttatttcaaaaatcattaacatactataaaagttacagtcctggcagttccaaatataaaaaacatttaaaaaacactacgagactaagaagagatatttacgatatgattcatgaacattgtaattcaaaaccttatatttaccattacatacaccaagatagacctgtgccactatatgcagtgtttgagttattcactttaggtaatctagtatttttcactcgttgtatgtcttctaatttgaatatagaagctcaaaaacaattaaaactatattcaccagcattcgatcaaagtaaagatatattaggtgatattattgattgcatgaaaggattaagaaatgctatagctcataatggcacactttatgactgtagatttaaaactggcgaaacaagtagtaggttaaaagaatatttaggggtaaaaatgggtataaacaatttagatttcgatagaataatcgattatctaattttattaatactaatttgttctggtctatcttattctaagacagaacttcaaagaattataagacaattcgagcaatttcttgattatttacgctcagaaataagcgaatctacttacgataaaattattggtgttcaagcgagacctaaattaagaggattaaaaaatttcatcaataaccttgatttctatctgaaaatagattaa

SEQ ID NO: 6891 - DNA, 777 bp, Staphylococcus epidermidis
gtgttcaaatatgcctttaaatactatgatctacaagatataagtgtactagataaaattgatatccctaaaaaagctaaaactagagatgaactacaagctaaacgaaacaactatttagaagatagtgaagttaaagagttattggattgtttcgactatctaattaagcataaaaaccatccatctcgcaaacgtaactacaacagggtcaaagctatagtacagtttcaaattgctaatggcatgcgtatcggtgaactacttgcaataaagagagaaaatataaactatgaagataaaacgctagatatcgacggtacaattaattgggtaactgataaagaaacaggagcgtttggagtaaaagaaactactaaaacaaataaaagttatagaacaataggactaactacccaaagtatcaacttacttaaaacacttattttggataataagaaagaaaaccagtggaatgaagattttattgatagagggtacatatttacaaatacagctggtagtcctatcgacttgaataaaataaacaatattatcaaagtggctactgatattagttcaataaagaaacgtgttacaacgcacacattacgtcacacgcatatatccacacttgcgcatttagggattaacctaaaagctatacaagagcgtgtaggacactcagactataaaaccaccctagagatatacacacatgttactgatcaaatggctaaagatatgatgaataaactagagagggttgaaaattaa

SEQ ID NO: 6892 - DNA, 234 bp, Staphylococcus epidermidis
atgtatttcaatgattggaaagttactattaacggaaaaggatcacatgatgttgtgacaaatgaagatactttgttaattttgcaagattatcaacatgttgaaatagcattaaaattagtaaacgatactattcaattaaaatcattaggctatggagaggatgtaagcattaaccctactacaaaagaaataacggttaatgtaacaaatttattagaagatgatgagtaa

SEQ ID NO: 6893 - DNA, 477 bp, Staphylococcus epidermidis
atgaaagaaatacccaaaaacagacttactttcaaagaaagtatgactgaaggtcgatatgtagctaccttaacaaaagaagaaaaatcttattataaaaaactatctattgatgaaaaaagaaaagcactaaatgatttcaacgcttctacaccgcaaaaggacgacaaagttagcttgttcgattatatgaaacgcactatgttaaaacacggtttagacgaagttacctcaattacagaaaatgctattttaaaaaacgaaccaggcaaacatatcgacagttttatgacgcgattgagcagtttttcaacaacaaaagatggaacaactgttttcacatatgagttaatcaatcaaaactttgttgttataaaaatattagatgaacaactgaaacaaaacaaaaagataatagaacaaaataatgaaatcatcagtttacttaaacaaatagctaataaaggagaaatgtag

SEQ ID NO: 6894 - DNA, 573 bp, Staphylococcus epidermidis
atgaaacaaaatagtcttgaagatttttcaaacattcttaaaaaatttagaaaagaagaagatttaactttagttaccctttcaaaatacttaggtgtatcagatgtatatgttagtaaattagaaaatggcaagcgttttccatctaagaatatcttgttctggtatgtattgtttatggatcaatctgaaatgcatgatgatattgaaaaattactaactatatttagtgaaaacaaaaaaataagttatgaacaattgagaacagaatatgacgagtttgttaaaaaattcaaagaagaacaaaaaaagcattcaagtaaaattcaaagaaaagaaattaaactgactatgaataaatttaatcaatacaaaattgaggaaatagatgagccttattttgatttaaaatggctattaaatcagtctgaatataagctgttttatagtggcatagataacaaaaattcttttggttttaatgaagttttatcagaaagcgataaaaaaatgttaagtgagatagtaaattcagtaattcaaagaatatataatgatgaaaatcataaataa

SEQ ID NO: 6895 - DNA, 525 bp, Staphylococcus epidermidis
atgattgctaaagtgaatcatttgaaacgtttgattgcatttgagggattgagtttaaaagattttgcaaatgaaatagaagtaaattctaactttttgaattccattgttaatggtaaaagaacgacttcctcaaaaacaacacacgttacagggtgtagattattaaaaaagaagcatattaatgattacatccaagaccaaaagaaaaaagtaatagatgaaagtgtattaagcgctaacgagttattgcatttattaactaattcagctattggtgatgagactgaaactaaggaagttgtagtcaaacgtggtgaatacaaggaaaatccacaaaatggtaaagtacaacttgtttacaatgaatatgttcagctagtagaagtccctattaagccaagtgatcgtttgaaagctcgtgatatgcttgggaaataccataaactatttacagataaacaagaaattacaaatcgaaattttgaaattaacataggtgaatgggatgaaaatgtggattga

SEQ ID NO: 6896 - DNA, 123 bp, Staphylococcus epidermidis
gtgaagcaagtaatcaacaattatcccaataatcaaatatttattgataacgtgttagaaaaatattatttaaactatggagttgaatcttttcaaagatttgactctttattgctgctttaa

SEQ ID NO: 6897 - DNA, 444 bp, Staphylococcus epidermidis
gtgtacgaattagagccgatgcaaataccagaaattaatatgtttaatgaagaactagataaagaattacaagaattttattatgaaaaacaaatgaagaacgatgaaaaaatagctagggatatagaaagaaatcaatatttaaaaacaattgctgaaaatactgatttaatagtttctcagacattaaatatagttaaatatcttcaaacaatagacagtttattaagtaagcaaaacattactttgagtgaagttaatatcaatcaatctgaattaaaaaatatcaatgctgatatatattcagaactggtaaaagttagaatagggacggaagaagatagattaaatgctactaggacattaactgaaagaataggagatgtgacaagtattgctagtgatctatttactgtaattcaaatgttaattggaaagttttga

SEQ ID NO: 6898 - DNA, 189 bp, Staphylococcus epidermidis
ttggataaagctaattactttttaaaagcattggtattggcaattatgcttcgttgtaccttgaattatttacttccgtcacctgaaacaataacttttaaaattttagatgggcttgtttttggtgttttaactgtacttttaattaattggattattggatttcttaagaagtattcacaaaaataa

SEQ ID NO: 6899 - DNA, 609 bp, Staphylococcus epidermidis
atgattaatataaatgatcctaattatttcaaaaggacaataaaaatatttatgatagcgattattatatttttaatagcctttgttttatctattatatttagcccatcacttgaaacttttaaaaatacttcaaatggaatatcttctaaattaagtgaagcacatggaatgaataaagtgtggctttacattttaaataatgctattaaagttccttttcaaatgtttgtattttctttaattcccataccttttttatactttctaaatataatttctactaatgtaatcacggggattgtttttgcatttgcaatacatcttaattttaataagggaatcataatggtcatgtcgtccattcctcattcagttgtggaaacaattgcaatgtgttttgttttaagtggtttatacaagttaaatcaatcaattcttagaaaagtaggtaatatgtttagaaaaactaaaaagaaagaaatttcgttcaagagggctttaattgatttatttaaggtttacttatttatcgctttaccactatacatacttgcggcgtttctagaaacatacttcacaagttttatatataatatatttacttaa

SEQ ID NO: 6900 - DNA, 627 bp, Staphylococcus epidermidis
atgaacgaaaaaaataaaataaattgtcctaattgcaataaacaaaaattagaaaaagtatcagacaattctcctaagaccctaataattctaagtatcttattatctatcttttccatattgatttcgcccaatatttttatgtttataatatgtttaattttaattacatctacaattgtcattgtacttaaaacttctcgctactattattgtaataattgcaaaaatgaatatgataaaaatttagaatatataaataaacccaataacaatcgaattaaaaagaagtcaagtattgatatattattgactatattagctggtaatataatactaataggtatcatattaagtttgttttttattgcttttaaatttattctcgttttaattttgaatgtaaacaatgatatgttactaatattaatcactatttctttcactataggtttaacaccctgtttgtcttataagttcgaaaattatgctttacgaaagtcaaaatttaattatgaaattgttgaaaatctttatgattctttgttgaggatttcttcgcctttattggtgttatacacttttctttatagtaaaaaatttataaatttatcaacagaaaattaa

SEQ ID NO: 6901 - DNA, 132 bp, Staphylococcus epidermidis
atgtggcacataaatttacatattttatataacttaagaactaaaagacatatagagattgaagaattaactactcaacttaacaagaaaaatggcacgcataacaaacctcttcaaatttgggaatggtaa

SEQ ID NO: 6902 - DNA, 261 bp, Staphylococcus epidermidis; identical to SEQ ID NO: 4078

SEQ ID NO: 6903 - DNA, 255 bp, Staphylococcus epidermidis; identical to SEQ ID NO: 4077

SEQ ID NO: 6904 - DNA, 135 bp, Staphylococcus epidermidis; identical to SEQ ID NO: 4076

SEQ ID NO: 6905 - DNA, 633 bp, Staphylococcus epidermidis
atggacggtttaattacatttatcattatcacattattgattattatagtacctgggccggatttcattattgtaatgaaaaacactattaattcaagtaaaatgaatggttttatggccgcatttggtattactacggggcatattttatactcttcattagctatttttggaattatatacatacttacgagtttacactttgtttttttaacaataaaaatattgggtgcttgttatcttatttatctcggaatcaaaagtattttgagtgcgcacagttctgttgattttagtaaacaagctttagctgatgtcagaaatgtgagttatatcacttcttttagacaaggttttttaagtacaagtcttaaccctaaggctttattattttatgttagtatattcccgcagttcctttctaacggtaatatacatatgaaatctgaagttgcgttatttgctttttcagttgttgtagttatatgcttatggtttttattttgtgtattcatctttcaatatattaaattattattcagcagaccgagattcaaggctatatttgattatattgtagggtttgttttaattggcttatctattaatttattattaagtaaaagtagctaa

SEQ ID NO: 6906 - DNA, 591 bp, Staphylococcus epidermidis
atggaaatttatttagtgaggcatggtgagtcacagtccaattatgataataaacacgggtatctatatttttgtggacagttagacgtccctttgacggaaaggggtataaaaagcgctaaagaactatctgtttattttaaaaataaatacattgacaatgtatatgtatcagatttaaaaagaacaaggcaaacgtatgaggagctatttccttatgatattccaacaatatatacaaagacgttaagagagcgttcgttaggtgtttttgaaggtaaaaataaagaagaagtttgtaaagacaaacggttcgaaaaatatttccgtgatcctaattataaatactttagacatagcttttcgcaaaaagcaccacaaggagaaagttatcaagatgtctatgatagagtggttactttcattgaaaatgagcttaatcaacagcagagacgtgtagtgatagttgcgcaccaagttgtaattagatgttttttcgtctattttaaaatgataactaaggaagaagccttagcgacggaaattcataattgctatccatatttaattaaaaaagaaatgaagttttga

SEQ ID NO: 6907 - DNA, 378 bp, Staphylococcus epidermidis
atgaagatacgtttaacatttattatcttagcaatactatccaccatcggcttagtacttgttttagcaaaatatccaacaggcccacacacaatcaactataacgaaccttatacagtactcatagccattacgacaatagttataatggctttaccagcactcatattaggtatatttaataatcttgcatgtagaatcatatcggcgatattacaaataagtgcactgatgatgtgggggtttttagtaatcattagcttaattatgggacaaattgtcattatgcttatggcttccttaacgatacttgcattacttgttagttctattgtcacactttcagtgcacccatctacttcagataaaataaattaa

SEQ ID NO: 6908 - DNA, 624 bp, Staphylococcus epidermidis
atgaaaaagagagtcattacatacttgatactagcgttgtctttaacacttgcagcatgctcaaatacgaacgataacaataatcaagagcatcacagcaacgctcatgcacctaaaaacgctaaaactttaaaggaaaaagatatcttttcttcaaacaaaaagggacaaaaaattagcgaaaaagagatgaagcaagctttagaaaaatatttacaagcgaatagcgatgtacttgataataagtatgtcatgcaacataaattagataaacaaagtgatagtaatcctaaaatcacagaatcacaagctgatcgtcttagcaagttatccaatttagcagttaagaacgatttacatttcaaaaaatttataaaaaacaatcacatccctgaagaatataaagatccaacagatcgcataattaattattttcacgctttaaatagtaccatttcaaatgtagatgcagacattgagaaattaaactaccaaccacaaaattcaattaacgttgttgatgtacccacaaaatattcaggtgatgtaaataaaaaacaacaagataaaattactactttccttaagaaaaaaggaatagacacagaagtatttaataaataa

SEQ ID NO: 6909 - DNA, 1524 bp, Staphylococcus epidermidis
atgcttaatgctgatttaaagcaacaattacaacaattacttgagcttatggaaggcgacgttgaattcgttgccagcctaggctctgatgataaatcaaacgaactcaaagaattattaaatgagattgctgagatgtcagcacacataacaataactgaaaaatctttaaaacgtacaccaagtttttcagttaatcgccctggtgaagaaacaggtattacattcgctggcatacctttaggccatgaattcaactctttagtattagctatactacaagtgagtggtcgcgcacctaaagaaaagcaatccattatcgatcaaattaaagggctcgaaggtccatttcatttcgaaacctttgtaagtcttacttgtcaaaagtgtcctgacgtcgttcaagcattaaacctaatgagtgttattaatcctaacattactcatactatgattgatggcgctgttttccgtgaagaatctgaaaacattatggcagttcctgccgtcttcttagatggtcaagaatttggtaatggacgcatgacagttcaagatattttaactaaattaggaagcacgcaagatgcctctgaattcaacgataaagatccttatgacgtgttaatcgttggtggcggacctgcaagtggtagtgctgcaatttatacagcacgtaaagggctacgtacaggtattgtcgctgatcgaattggtggtcaagttaatgatactgctggtatcgagaacttcatcactgttaaagaaacgacaggttcagagttctcatcaaatcttgcagaacatattgcacaatatgatattgatacaatgactggtattcgtgctacaaatatcgaaaaaacagattcagctattcgcgtaactttagaaaatgatgctgttttagaaagtaaaactgtcatcatttccacaggtgcaagttggcgtaaactaaacatcccaggcgaagaccgtctaatcaataaaggcgtggctttctgccctcactgtgacggacctttatttgaaaataaagatgttgctgtcatcggtggtggtaactctggtgtagaagcaactattgatttagccggcatcgttaaacacgtaacattatttgaatacgcttctgaattaaaagctgatagcgtattacaagaacgtttacgctcactacctaatgttgatattaaaacgagtgctaaaacaacagaagtaattggtgacgattacgttacaggtattagctatgaagatatgactaccggagagtcacaagtagttaatttagatggaatatttgtacagattggattagttcctaatacatcttggttgcaaaatgctgtcgaattaaatgaacgtggcgaggttatgattaatcgcgataacgcaacaaacgttcctggtatctttgcagctggtgacgttaccgatcaaaaaaataagcaaattattatttctatgggtgctggtgctaatgccgcacttaatgcattcgattatataattagaaattaa

SEQ ID NO: 6910 - DNA, 570 bp, Staphylococcus epidermidis
atgtctttaattaacaaagaaattttacctttcacagcacaagcttatgatccaaaaaaagatgagtttaaagaagttactcaagaagattttaaaggttcttggaacgttgtatgtttctatcctgctgacttctcattcgtatgccctactgaattagaagatttacaaaatcaatacgctaaattacaagaattaggtgttaacgtgtactcagtatcaacagatacacacttcgtacacaaagcttggcatgaccattctgatgcaatcagcaaactagaatacagcatgattggtgatccttctcaaacaatcactcgcaatttcgatgtgttggatgaagaatctggtctagcacaacgtggtactttcattatcgaccctgatggtgtggtacaagcagcagaaatcaatgctgacggaatcggacgtgacgcaagtacattagttaacaaaattaaagccgctcaatatgtacgtcaacatccaggtgaagtttgcccagctaaatgggaagaaggttcagaatcattacaacctggtttagacttagtaggtaaaatctaa

SEQ ID NO: 6911 - DNA, 780 bp, Staphylococcus epidermidis
atgacactaacaaataaagaagttgctaaagttttatttaaagcttatagatataaaaaacccatcgatttcattagtgagaactatcaattaaacgaagaagaagcatatcatgtacaagaagaactaattgaccaattaactttcaaagaccgttcgactgttacagggtataaagttagtatgactagcaaggcaacgcaagcaattgctaacactaacgaacctgcatatggaacactcttatctaaccaaattgttaatgatggtgcctcagtctctctttcagaattattttcaccattactagaaccagaaattatctttatagtgcaggaagacttaccttatgatgctgatttagaaacaattagatattatacccgtatcgcgccaggcattgaaattccagatgcaagatataaaaattggtttccaaattttactttatcagatttaatatcagataataccgcaacaggacttgtcgtagtaggtgaccctgtagacggacttgataacgatgcatttgctaatgtacatttaaatttatataaagatgataaatgcattgccacaggagaatcatccgaagtactcggaaatcctttaaacgctattcattggctaattaaaaaactacacacgcacggtaaacaacttaaaaaaggagatatcatttcatctggaacttttatatctccactaaaattagaatatggcacgtaccgtgctgaatatagtggtatcggtaaggtatcattttcggttaataaataa

SEQ ID NO: 6912 - DNA, 756 bp, Staphylococcus epidermidis
gtgtcagattatgtttatgagttgatgaaacaacatcattcagttagaaaatttaagaatcaaccacttggttctgaaacggtagaaaaattagtagaggcgggacagagtgcttctacatccagttatcttcaaacttattctattattggtgttgaagatccaagcattaaagcgcgtttaaaggaagtgtcaggtcagccttatgttttagataatggttatttatttgtatttgttttagattattatcgtcatcatttagtagatgaagttgcggcgtcaaatatggagacatcatatggttctgcagaaggactattagtaggtacaatagatgttgcattagttgcgcaaaacatggcagttgctgccgaagatatggggtatggaattgtttatttagggtcattgcgtaatgatgttgcgcgagtgcgtgaaattttaaatttacctgattatacgtttccgttatttggtatggcagtaggtgaaccttctgatgaagaaaatgggtcacctaaaccgcgcttgccatttaaacatatttttcataaagaccagtatgatgcgaatcagcatcaacaacgtaaagaattggaagcatacgaccaagtagtgagtgaatattataaagaacgtactcacggtgtgcgtgcagaaaattggtcacaacaaatagaaacatttctaggacgtaaaacacgtttagatatgttagatgaattgaaaaaagcaggatttattcaaagataa

SEQ ID NO: 6913 - DNA, 1389 bp, Staphylococcus epidermidis
atggaaatactttttacagtaattaatgtcatcgtgttacttgttttcctaataatgttaaatattatggcaagaaaacacgtctcattccctaaacgtgtctttaccgctttagcaataggtatcgtatttggcattgtattacacctcatatatggtgcagagtctaaaactctcgaacaatcaacagactggtttagtattgttggagatggttatgttgcactattacaaatgattgtcatgccactaatattcatttcaattgttgccgcttttagcaaaatacaaattggtgaaaaattcgctaagatcggttcttatatttttatgtttttaattggtactgtagccattgcagctatcgttggaattttttacgctttgatctttggtttagatgcatcgtctattgatttaggtagtgcagaacattcacgtggtacagaaatttcaaaacaagccaaagatttaactgcaaacactttaccacaacaaattctcgaagtattcccaagcaatccatttttagatttcacaggacaacgtacaacttcgacaattgcagttgttatttttgcaacgtttgtgggctttgcttatcttagagttgcaagaaaacagccggaacatggaagcttacttaaacgtggtatagaagcaatctattctatcgttatggctatcgtaacttttgttttacgattaacgccttatggcattttagctattatggcttctactcttgcgacaagtgatttttctgcaatttggacgttaggtaaattcttaattgcttcatacgcagctctaatcacaatgtatattatccatttaattatactgagtgtcttaggtatcaatcccgttaaatacgtgaaaaagacaatagaagtactaatctttgcatttacttcacgttcaagtgcaggtgcattaccgttaaatgttcaaacgcaaacaaaacgtttaggtgtacctgagggaattgcaaacttctctgcaacttttggtttatccatagggcaaaatggctgtgcaggaatctatcctgctatgctagcagttatggtggcaccagtagcaaatgtagaaattgacttccaatttgttgttacacttattgctgttgttattataagttcatttggcgttgcaggtgtaggtggcggggcaacattcgcatcaatactcgtattatctacacttaatctaccagttgctctcgcaggggtactgatatctatcgaacctctcatcgatatgggtcgtacagcacttaacgttaatgactcaatgctagctggaacaggtaccgcacgcttaacgaatcattgggacaaaaaaacatttgactcaaatgattacggcgatttatctgcaaattaa

SEQ ID NO: 6914 - DNA, 903 bp, Staphylococcus epidermidis
atgttaactaaagaatttgctcaacgtgtagaactaagtgaaaagcaggtccgaaaaattgtacaacatttagaggaacgaggctatcaccttagtaaaacagaatatcgtggtcgtgaagccacagactttaaagaagatgacatcgaattatttacagatatcgctaacaaagttaaacaaacaaatagttatgatttagcatttgaagagcttgaaaaggaaaaagactttttacaagtcattgttaaagacgaggatagccaattaccaactgatcaaaatgtagcacaactcgttgaagatttacgttctgaaattcaaaaaatgcgagaagaacgtcaaatgttagggcaaatgattaaccaagttcatcagcaacaacaggaactcaaagaattacaaactgatatcacaacaaaattagattcgaatgctcaatctttaaaatcaatccaaaattctcaagaggctattcagtcagcacaagaacaacaatctaaagacatcgctaaagctaacgaattaaaagatagtgaattacgtagtcattttgattcaatgtcaaatagcgcttcaatatctcagagcaacgtcgcaagtcaaagcactacagcaagtttgagccaatctgaatcagcaaatgattcaatgagttcatctctgtccgagtctaactcaataacatccgaaagtaatacaaatagcaaatcggaaattgaatcaaaaagtacgtctacaagcgagttcttgtcagaatcaggaagtgtatctaactcagaaaaatctgagtcaatttctcattctcaatcaacatcagctacaccttcttctcaatcgacttaccaacaacaacctaaagaagagaagaaaggtttctttgcacgtctatttaacttataa

SEQ ID NO: 6915 - DNA, 666 bp, Staphylococcus epidermidis
atggaatttaaagtgatagaatcagctaaagatccattatttaacgaggcactcaaattatatgatgataaattggatattggtttagatgaagatagtaaaatttttaaacgctcacttgaaaataataaaacagaaaatgattacgcctttatcgttggaattgaaaaccagactgtagttagcttagcaactgcacattacgaagcaacaaccaattctgcatttttaatttacttaatcgcaaaagaaagccccaatcatgatgaaagaatgtccttaactttagaggcaatagaaaaacaattaaaccttttatcacaagaagttcataatagagatattaatttcatcatgttagaagttccaaaagaaccctcgactgctaacatcgatgacaagctcagaaatgcactagaacatcgtcgtcaattcctctttgaaaatcaatttgaaaagcaggacgacattgactatattcatccaaaccaaaatcaaaaggaaacgccacaaaaagtagatttatttattaaagctaacattgaattaacaaaggacatttatggtacaagtgtcaaatctaattatattcttaaatatgtttttgcaaatggcatttcaagagaaattatttaccctctcctaaaagaaatgaatttaagatag

SEQ ID NO: 6916 - DNA, 408 bp, Staphylococcus epidermidis; identical to SEQ ID NO: 4064

SEQ ID NO: 6917 - DNA, 579 bp, Staphylococcus epidermidis
gtggagtcgttaggacgaaaagtcaaagaagatggcgttgtcatcgatgagaaaattttgaaggtagatggatttttaaatcatcaaattgatgcaaagttgatgaatgatgtaggtaaaacattttatgagtctttcaaagacgctggtattactaaaattttaactattgaagcttctggtattgcgcctgctattatggcttcttttcattttgatgttccttgtctatttgctaaaaaagctaaacctagtactttgaaagatggcttttatagcacggatattcattcatttacaaaaaataaaacgagtacagtcattgtatctgaagaatttttaggtgcagacgataaagtacttatcattgatgactttttagctaatggtgatgcttcgctaggtcttaatgacattgtaaaacaagcaaatgcgacgacagttggcgtgggtattgtggttgaaaaaagtttccaaaatggtcgccaacgtttagaagatgcaggcttatatgtatcttcactttgtaaggtagcttcattaaaaggcaataaggtaactcttttaggtgaagcgtaa

SEQ ID NO: 6918 - DNA, 1269 bp, Staphylococcus epidermidis
atgaaaaatttcatattaagtgtgcaacatttgttagcgatgtatgcaggggctattcttgttcctattattgtggggacaagcttaaaattttcagctgaagaaattgcttatctagttactgttgatatatttatgtgcggggtagcgacatttcttcaagcaaataaagtcacagggactggattaccgattgtactaggatgtacgtttactgccgttgcacctatgatactcatcggtcaaacgaaaggacttgatgttttatatggttcgcttttaatatccggtatcttagttgttttaattgcaccttttttctcttatttagttaaattctttccacctgttgtaacaggaagtgttgtgacaattattggaatcaatttaatgccagttgcaatgaattacttggcaggtggtgaaggagcgaaaaactatggcgatactaagaatttaatattaggtggtgttacactactcattattcttattttgcaaagatttacaaagggcttcttgaaatcaattgcgatacttataggattagcaataggtactgctttagctggtatatttggaatggttgatatcaaacaagtgggtgatgcacattggtttggtttccctgtgccattcagattttctggcttcggatttgatgtcagctcaatacttgtatttttcattgttgcagttgtaagtttaattgaatctactggtgtctatcatgcactgagtgaaattactggtagaaaactagaaagaaaagattttcgaaaagggtacactgcggaaggtctagcaatcattttaggttcaatatttaatgcgttcccttacactgcatattcccaaaatgtaggtcttgtttctttatcaggagctaaaaagaacaatgtgatatatggaatggttattcttttactaatttgcggttgtatacctaaattaggtgctttagctaatattattccattgccggttttaggtggggcaatgatagcaatgtttggaatggttatggcatacggcgttagtattttgggtaacattaatttccaaaatcaaaataatttattaattattgcaatttcagtagggttaggtgctggtattagtgcagtacctcaagcatttaaaggattaggagaacaatttgcttggttaactcaaaatggtatagtgcttggcgcaatttctgcaatcatcttaaatttcttttttaatggtataaagtataaacaaactgaagaaaatgtgaaataa

SEQ ID NO: 6919 - DNA, 1467 bp, Staphylococcus epidermidis
atgtgggaaaataaatttgctaaagaatctttaacattcgacgacgtgttactcattccagctgcatcagatgttttaccaagcgatgttgacttaagtgtcaaattatcagataagatcaagttaaacattcctgttatctcagcaggtatggatacagtaactgaatcaaaaatggcaattgctatggctcgacaaggcggtttaggtgttattcataagaatatgggcgtcgaagagcaagctgatgaggtacaaaaggttaaacgttcagaaaatggtgttatttctaacccgttcttcttaacaccggaagaaagtgtgtatgaggctgaagcattaatgggtaaataccgtatctctggtgtacccattgtcgataatcaagaggatcgcaagttgattgggattttaacaaatcgtgatttacgttttattgaagatttttcaattaaaatatcagatgtaatgacgaaagataatttaataacagctccagttggtacgaatttagatgaagccgaggctattcttcaaaaacataagattgagaaacttccattagtagaaaatggtcgtttagaaggattaatcactattaaagatattgaaaaagtacttgaattcccatatgcagctaaagatgaacatggcagattgttagctgcggcagcaatcggtacgtctaaagatactgaaattcgtgcacaaaaactagttgaagctggcgtagatgcattaattattgatacagctcatggtcattctaaaggcgttattaatcaagttaaacacatcaaggaaacatatcctgaaattactgttgtcgctggtaacgtagcgactgcagaggcaacacgtgctttatttgaagcgggtgccgatgttgttaaagtaggtattggtccaggctcaatttgcacaacacgtgttgttgcaggtgtaggtgtgcctcaaattacagcagtttatgattgtgctacagaagcccgtaagcatggtaaggctattattgctgatggtggtattaagttctcaggtgatattatcaaagcattagctgctggtggtcatgcggttatgttaggtagtttgttagctggtacagaagaaagtcctggtgcaactgaagtattccaaggtagacaatataaagtttatcgcggtatgggatctttaggtgctatggaaaaaggttcaaatgatcgttacttccaagaagataagacgccaagaaaatttgttcctgaaggtattgaaggtcgtacagcttataaaggaccattacaagatacaatttatcaacttatgggtggcgttagagctggtatgggttatactggttcagaaaacctaaaaaaattacgtgaagaagcacaatttacacgtatgggaccagctggtttagctgaaagtcatcctcacaatgttcaaattacgaaagaatcaccaaactattctttctag

SEQ ID NO: 6920 - DNA, 1542 bp, Staphylococcus epidermidis
atggaaatggcgaaagagcaagagctgattcttgttttagactttggtagccaatataaccagttaattacgcgtcgtatccgtgagatgggcgtttatagtgaattacatgatcacgaaatttctattgaagaaattaaacgaatgaatcctaaaggtatcattctttcaggtggtccaaattcagtgtatgaagaggggtcatttaccatcgaccctgaaatttacaatttaggtattccagttttaggtatttgttatggtatgcaattaacgactaagcttttaggtggtaaagttgagcgtgccaatgagcgtgaatatggcaaagctacaattaacgctaaatcagatgaacttttctttggcttaccttctgaacaaacagtatggatgagtcattctgataaagtaattgaaattcctgaaggatttgaagtgattgcagatagtccaagtactaattatgcagctattgaagataaaaaacgtcgcatttacggtgtacaattccatccagaagtacgtcacactgaatatgggaacgacttactaagaaacttcgtccgccgtgtttgtaattgtacaggtgaatggacgatggagaatttcattgaaattgaaattgagaaaatccgtcaacaagtaggtaatcgtaaagtattatgtgcaatgagtggtggagtagattcatccgtagttgctgtacttttacataaggcaatcggcgagcaattaacatgtatttttgtggaccatggtctattacgtaaaggtgaaggtgacatggtcatggagcaattcggtgaaggttttgatatgaatattattcgtgttaatgctcaagaacgcttcatgagtaaactaaaaggtgtgtctgatccagaacgtaaacgtaaaatcattggtaatgagtttgtatatgtctttgatgacgaagctgcgaaattaacagatgtagatttcttagctcaaggtacgttatatacggatgtgattgaatcaggtactaagacagctcaaacaattaaatctcaccataatgtaggtggattacctgaagacatggaatttgaacttattgaaccaatcaatacattattcaaagatgaagtgcgcgcattaggaatagaattaggtatacctgaacacttagtttggagacagccgttcccaggacctggattaggtatccgtgtacttggagaaattactgaagataagcttgaaattgttcgtgaatcagatgcgattttacgtgaagtgattcgtgaggaaggtcttgaaagagatatctggcaatactttacagtacttccaggtattcaatcggtcggtgtcatgggagactaccgtacgtatgatcatactgtaggtattcgtgcggtaacatccatcgatggcatgactagtgactttgctagaattgattgggaagtcttacaaaagatttcaagtcgaattgtcaatgaggtggaccacgttaatcgcgttgtctatgacattacctctaagccaccaagtacaattgagtgggaatag

SEQ ID NO: 6921 - DNA, 204 bp, Staphylococcus epidermidis
ttgaaagttcgtgatgatatgcttgggaaatgccataaactatttactgagagaaaagagtttacaggtgatacgccagtaattgttaatattggcgaatgggatgagggcgatgaagaagataaacagagagctctagataaaataaaagaaaactatcctaatagaactatgattgtggatgatataccgttagaggattaa

SEQ ID NO: 6922 - DNA, 189 bp, Staphylococcus epidermidis
ttggacaaagttaattactttttaaaagctttagtattggtaattatgcttcgttgtaccatgaattatttacttccatcacctgatacaataacttttgaaattttagatgggcttgcttttggtgttttaactgtatttttaattaattggattattggaatttttaagaagtattcacaaaaataa

SEQ ID NO: 6923 - DNA, 618 bp, Staphylococcus epidermidis
atgattcagactattgtaactgctgctattctgtatattgcgacagcagtagatttattagtgattttgttaatattttttgctaaagcaaagactaaaaaggaatatcgagatatttatattggtcaatatgtaggatctgtgacattgattgtcgtaagtttattctttgcctttgtcttaaattatgttcctgaaaaatggatattaggattattagggttaataccgatttatttaggaattaaagtggctatttatgatgattgtgaaggagaaaagagagctaaaaaagaattgaatgaaaaaggattgtctaaattagttggtacggttgcaattgttacgatagcaagttgtggtgctgataatattggtttatttgttccgtattttgtgacattaagtgttactaatttattcattactttgtttgtctttttaattttaattttcttcttggtatttactgcacaaaaattagctaatattccaggagttggagaaattgttgagaaatttagccgttggattatggctgttatttatatagctttaggtttatttattattatagaaaatgacactattcaaacaattttaggatttatattttaa

SEQ ID NO: 6924 - DNA, 348 bp, Staphylococcus epidermidis
atgagttatgaaaatgcttgtgatgtgatctgtgtacatgaggataaagttaacaatgctttaagttttttagaagatgataaatctaagaaattacttaacattttagaaaaaatttgtgatgagaagaaattgaaaattatattatctttgattaaagaagatgagttgtgtgtttgtgatatttctttgatattgaaaatgagtgttgcttcaacttcacatcatttaagacttttatataaaaatgaggtacttgatttttataaagagggaaagatggcatattattttattaaagacgatgaaataagagaatttttctctaaaaatcaggagggtttttga

SEQ ID NO: 6925 - DNA, 162 bp, Staphylococcus epidermidis
atgagaaattcaccaaataaacatggtgaaactaaatatcgctattatgagaagtataaagattcactcacaaacaattggcgacgtgttagcatggtatttagaaatgataagcagttacaaaaagtggctcagaaacgcttaaataagatgagcgtatag

SEQ ID NO: 6926 - DNA, 531 bp, Staphylococcus epidermidis
atgaaaaaattattatgtacattatttgctgctgcactagtgttaagtgcttgtggccaagacgacactaaggaagatgaaaataaaaagtcagaaattactactgaaaagaaatctgacgataaaaaagacaaaaaaactaatgaggataaaaagtctggagaacaaaagaaatctcaagaaaaaaagaataacaagtcaatgcaagaatctgctacaaatgaacaggttcaatctcaacaacaaacgcaacaagctaatcaacaagcacaacagtctgataatcatgaacctacaaaagaagagatatatgaatgggataaacaaaacattcccggaggtacagattttggtttgattgatccagaagatgtaaatgaagcttcggaatctcaaaacgaagaaccagatgaatggattaaaggacaagaggaatggaataacgctactcaatcagaaaaagaggagctacgtaaacagaacgcgcaaaagtatggttatgagtatgatcctaaagattatgaagaataa

SEQ ID NO: 6927 - DNA, 402 bp, Staphylococcus epidermidis
atgaaaaagttttttatatttttattaagtagtttattagtgctagctgcatgtggtaagaattatgaaatcagtgatattacaagcaaatttaaaaaagaaggtttaagtgtcgaaaacttacgaaaaatggaccgtgaagattttggtatggcaccaatgaaaactgaaaatgctaaaatatttactgtttcagaagataagaatgcacgtattttaaaatttaaaaatgaagatgacctaaaagaaatgaaaaagtattatgaagaattgggtaaatccagtgctacgttctattcacatgtatacactaaagataaatttttaattcaaatgaatggcgacattgacgatcatgtatttgaaaagtataaaaaagctatgaatgaggcattaaattaa

SEQ ID NO: 6928 - DNA, 117 bp, Staphylococcus epidermidis; identical to SEQ ID NO: 4053

SEQ ID NO: 6929 - DNA, 267 bp, Staphylococcus epidermidis
ttgcgagatacgcaaatagataacttcaaagaaattatgtcacaaaaaaagtacttaattttaatcataggcggtgacagtccacgtattaaagcacaacctttagtccaccaatttaaattaatatttgaatttatgaatattactcattttagatttttaataggcgaaggtaataaaccattcgatgttttaaatgactcacaatttatggaagaactcgcaaatacaaatcttgctttgaaaaaaggtgatatttatgattga

SEQ ID NO: 6930 - DNA, 117 bp, Staphylococcus epidermidis
atggagacttttattagaattcctcaaattaatcctccacgacatattaatgaaatgattgaaacgatacacaatcgtgattttgatgaattcagttctctaaaaagaacaatttaa

SEQ ID NO: 6931 - DNA, 1029 bp, Staphylococcus epidermidis
atggatttgcttataggtacattatttttaattttagttttagttgtttttactctatttacatataaggcacctagtgggatgaaagcgatgggtgctttagcgaatgcggcaattgcttcgtttttagttgaagctttcaataaatatgtgggtggacaagtatttggtattaaattcttagaagaattaggagatgctgctggaggtttaggtggtgtggctgcggctggattaactgcattagcgattggagtatctccagtttatgcactagttattggggcagcttgtggaggtatggacttgttaccaggatttttcgctgggtatattgtaggctacatgatgaagtataccgagaaatatgtgccagacggtattgatttaattggttcaatcattcttctcgcacttatagctaggttaattgctactggattgacgccagtggttaataacacgttaattaaaattggggatattatacaaagtagtacagatgctaacccgttgattatgggaattgtattgggaggtattattacagtagtaggtactgctccattaagttcaatggctctcactgcattgcttggtttaacgggtgcgcctatggctataggtgccatggccgcatttagttccgcgtttatgaatagtgcattgttccatcgtttgaaattgggagaccgtaaatcaaccatttcagtcggaatcgaaccgctttctcaagctgatattgtttccgctaatcctattcctatttatgtcactaatttctttggtggggcaattgccggtattataattgcttggtcaggtatgattaataatgcaactggcactgctacacctattgcaggttttttagtgatgtttggttttaatagtttaacgaaagtgattatctatggtgtggttatggcgattataggaactattgctggtattgtagggtctattgttttcaaaaagtaccccattattactaaaaagcaaatgttagaacgggacacaacgacataa

SEQ ID NO: 6932 - DNA, 384 bp, Staphylococcus epidermidis; identical to SEQ ID NO: 4049

SEQ ID NO: 6933 - DNA, 1203 bp, Staphylococcus epidermidis
atggcgaaaatacctgtaactgtattaagtggatatttagggtcgggcaaaacgacattgcttaatcatatattaaaaaatagagaagggcgacgcattgctgtcatagtcaatgatatgagtgaagttaatattgataaggatttagtagcacaaggtggcggcttatctagaacagatgagaaattagtagaactttctaatggatgcatatgttgtactttaagagacgatttgttacgagaagtcgagcgcttagttcacataggaggaatcgatcaaattgtaattgaatcaactgggatatctgagcctgtgccggtagctcaaacgttctcatacatagatgaagaattaggtattgatttaacctctatatgtcgattagatacaatggtgacggttgtagatgcgaatcgctttgttaatgatatacgtagtgaagatttattggcagaccgtgatgaaagtgttgatgatgaagatgagcgtactattgctgacttactcattgatcaagtagaattttgtgatgtgatgattataaataaaatcgatttgattagcgacgaagctctagaaaaattagaaaatgtattacgtgcattgcaacccgaagctaaaattattaaaacagtaaatgctaaagtggaattatcagatgtacttaatacgcaattatttgattttgagaaggcaagtgaatcagctggatggatcaaagaattaacagctggaggacatgcgacacatacgccggaaacagaagagtatgggattacatcatttgcttatactagacgattaccatttcatgcaaaaagatttcatcaatggctagaacaaatgccagaaaatattgtaagaacaaaagggattgtatggttagcgcagtataatgatgtagcgtgtttgttatcacaggctggttcatcttgtaatattcaccccgttacatactgggttgcaacaatgagtgaaagtcaacagcaagctattttggaggcacgtcaagatgtagtagaagattgggatatcgaatatggagatcgtcaaacgcaatttgtaattattggtacggatttagatcaagaaaaaatttcccgggaattagatgcatgcttaattcatagtagtgagattgatgaagattggcgattactagatagtccgtatcaatggacttatgatcgacgaatgtaa

SEQ ID NO: 6934 - DNA, 264 bp, Staphylococcus epidermidis; identical to SEQ ID NO: 4047

SEQ ID NO: 6935 - DNA, 1497 bp, Staphylococcus epidermidis
atgttaagttcagagttaattttgtttatgttttttattacacttgtcattgctatactgagtggattaatatttttgaatcatcgagttcccattcaatatattaaatttcatatatatttacttgttttacctatcattgcgggattaagtggattaatatttttcggtgaaagggcgaatgttggaccttttgtagttgatcatcttacttggttaattatgacatttattttgactttaggctttatcattcaaaagttttctatgcgttatttaattggcgacatgcattaccgtaaatattttccgttttttacattaattactgcatttgcttcattggcatggttaagtggagacttaaggttaatgatcatgttttggggtgcaacattatttgtgttaacacggctcattaaagttaacaaattatggaaggtgcctagggaagcagcaagaatttcagcttggtcatttatattggcatggttgtcgttattgattgctgtcattttattgtatatcgctacaggagattggtatattcattcgaatatgtcagatgataatgcaatcaattatggaatgcgtctctgtatcaatttacttattgttttagctgtgattattccggcggcacaatttccatttcaaggctggcttattgaatctgtagctgcgcctacgccagtttcagctattatgcacgctggtattgttaatgctggtggcgtgattcttacacgcttttctccggtatttaatgacgaaatagccatttcactgttattaattattgcaagtatttcagtattgttgggttctggaatcagtcttgtgcatgttgattacaagagacaacttgtaggttctacgataagtcaaatgggttttatgttagtacaatgtgcgcttggggcatattctgcggcgatagtacatttaatattgcatggcgtgtttaaagcgacattatttctacaatcgggttctgttgttaaaagatttaacattcctacgcctccatctgttaaaaaatcatatggctggcttgtatttggtcgtctactagctattcttatagcgataatattttggttgaatagtgatagacatgcatatgatgtattaagcgctcttatattagcttggtcgttaatggtttcatggaatcaattagttgcttttagtcatggactcatcggaagagtcattggagtatgtatgattattgttgtagcaattgtttatattattacgcatcattatttcttcacgacattaagtaacgttgatattcatattgtttcaccaccactcataagtattattctatcgattgctattatagttttcggcagtatgttaagcatatgggtagcacggcgaagagaatcaaaggcatttgcgaagttatacttgtggcttattaaagtaggagaggctaaaacccaatctatagaaagtcatccatcatatttaaaacgattttag

SEQ ID NO: 6936 - DNA, 2568 bp, Staphylococcus epidermidis
atgcttcaatcagatatcaatgaattagtcaatcaggctaaacgtgtaattacacctttatcaccgatttcaacatttgctgcccgtaatccgtgggaggggctagaagatgcttcgtttgatcaagtggcacgttggttaaaaagtgtgagggatattgacatttatcctaatgcgtctactattcacagagcgattagtaataaagaaatagatttaaaagtatttgaagaacggttggatgaaaatcgtgcgcattataataataggtcactatctgacagtgatatcaacacatatattcaaagagcgaaaaatttaaaaacgattgaagaaggttactttaatacaaaagataacgagaaactggaaaaatgggtacaagctaattttaaggattataagaaaaaagaagatgtgatagcgcaaagtgctagtgttttcacaaaggaaggtacacgacttattgatattttaaatgttcatatgattaagtggtctaaattatatgttgatgactttcaatcaagttggactatgccaaaaagagaaaaaggattctatcatgcctggcaacgtttagttaaacatgatccattattcacaaaaaaacaacgacttactttagcacatttgccaaatcaagcaaccgaagcaatagagtacgcctttcaagaattaggagtaaaagaagaacatcgacaatcatatattgagagtcatttattatctttaccaggttgggcaggaatcatgtatcatcggtcacagacacaaagtaatgatgcttacttattaacagactatgttgcgattcgtctatcaattgagatggtacttttaaatgaccaccatacaacattattaaaaaaatctatatatcttcaaaaaaagttagagcaaatacgttatttgctatttaacatacaaatgaatgttgagcagtggttaaatctatcatctaaaaagcaacaagcatacattgaattggggacacgattcagcctgttttattttaaaaagttatggttagatgcatgggaagaaacgcatgaacgtcgattggttgatgaaatttatcgtgttccaaccgaaaatactgatcaagcaaaagcaaaagtacaacttgcgttttgtattgatgtacgatccgaaccgtttagaagacatttagaaagtgaagggccttttgaaacaatagggattgctgggttctttggtctgccaattcaaaaagaagtacttgatgaacaatttgcacatccatctttaccagtgatggtagaacctgcatatcgtattaaagaatatgctgatcaacatgaaatgaaaatttataatcaacaacaacatacacttacatctatgttttacaactttaaattaatgaaaaacaacgtgttgccaagtttgcttttaccagaattaagtggtccttttttaagtattgcgactatagctaacacaattttccctaaaaaagcaaaacgtattgttcatcgattctcacaaaaatggctacgtaaaccaacaggtaaattaactattcagcgtgagcaagatgcgtattcaaaactaccaatcggctttactttagaagaacagattcaattttccaaaaaagcattacaattaatggacttaacagatgattttgcaccacttattgttctatgcggacacggtagtgaatcacataataatccctatcatgcttcattagaatgtggggcttgcggcggtgcctcgagtgggttcaatgcgaaattattagcagcaatgtgtaatcaagaaaatgttagacgtggattattgatggaaggaatcgacattccaagacatacagtgtttatagctgctgaacatcaaacgtcagttgatgagttagagtatatttatgttccacctttaactacagaagctcaaaatgcctttgacgaacttaagcatgtgatgccaaaagtatgttataaagccaatttagaacgtttggcatcgttgccaaatataaaaaacactgaccataatcctaatgctgaagcgcatcgtcacgctagcgattggagtgaagttcgtccagaatggggtctagcacgaaatgctgaattcattattgggaaacgtcaaatcacccaaaatagtaatctagagggacgggcatttcttcataattatgattggacaaaggatgaagacggtgagattttaaatacaattatttctgggccagcactagtagcacaatggattaatttacaatactacgcctcaaccgtggcacctcactattatggaagtggtagtaaaacaacgcaaactgtaacaagtggtgtaggtgtcatgcaaggaaatgctagtgatttaatgtatggcttaccatggcagtcagtaatgatgaatgacaaagaggcgtatcacgcacctattaggcttttaattattattcaagcgccagatgcatatattcaacgtttgttaaaacatcataatcactttagacaaaaggttgatcatcaatggataagacttgccagtattgatgaaaataatagttggaaagactggtag

SEQ ID NO: 6937 - DNA, 369 bp, Staphylococcus epidermidis; identical to SEQ ID NO: 4044

SEQ ID NO: 6938 - DNA, 249 bp, Staphylococcus epidermidis
ttgtttactaaaaaaatattgatttatattgcgctccttattaccttaattcgtttttttattccattacatccagactttgatacgttgttagtatggttgtttattctttacataattccaattattttatgtatcattggctttaaatcagataaactcatcgctactatgattatgattccaaatttaatggatataggttatcgtctattcatcttctttaatgactttttgcatttaaaataa

SEQ ID NO: 6939 - DNA, 672 bp, Staphylococcus epidermidis
atgaattttaaatatatgaatatagcaaaagggataattccaattttaataagcatgattattcttttaagctttatctctactcatgtgctagcgcaaaatcagtggttgagaatggttgatcttagcgtacaagagtggtttagtaatcaatttggggatcccaatagagtgtttggacatggtttcatcaacaatataatgacgttttgcgctacctttggtgatgttaagatcattttaattgtggctaccattattgcagtgctactcacgttttacaagaaggttccacaagcaatatggctaatcataacgatgactagtggcgcattgattaattatttaattaagcaaacgattgaaaggtcaaggcccgagaatcatttaattgttgatacaggatggtcttttcctagtgggcattctaatattaatacattattctttttaatgattatgatcattattatcccgttaatccgacagcgtgcttttaaatttataatcacaattttaagtattgtattttggattagcgttttaataagtagactgtattttcatgcacactacttttctgacgttgtaggaggcgtaagtttagctattatttgggtgtcgttatttatattagtgtcacctttattaaaatttgggggagaaaagtaa

SEQ ID NO: 6940 - DNA, 729 bp, Staphylococcus epidermidis
atgaaagttaaatcaccacaatcaatctacttaaaaggacatcgtcaacaagctgtattgttattacattcttttacgggaactgtacgtgatgtaaaacatttagcacaacagttgaatgaagagggatttacttgttacgtgcctagttatccaggccacggtttgccacttaaggaatttacccaacacaatattaatgattggtgggaacaagttacagcagcatatcaatttttaagaaatgcaggatacagtagaattaatgtgacaggcgtatcattaggcggattatttactttaaggttagctgaacattttgatttagaacgtatagctgtgatgtcagccccacataaaaagcgtgaaagcgagattgcgtggcgtcttgaaaggtatgggcatcgaatgaatgaaattttgagtttaagcgaagaagagcgtcgtcaccaaatggaaaccatcttgtcttatgataaagaaattgaagtgtttcaaggtgtaattgatgaaattatggcttatcttgcaaatattacagtaccagtgaatattatgtatggcgaagaagatgacccattatatgctcaaagtgcgcaatacatttatgataatgtaaatagtcaagataaagaactgctcaaatttgaaaaaagcggtcatcttatgacgtatggcgatcatgcatacagagtagaacaatctattattcaatttttcagtaaataa

SEQ ID NO: 6941 - DNA, 243 bp, Staphylococcus epidermidis
atgaaacgtacatttttattaacttatacaaccgtatcaggaaaaacatatacggaatttaaaacatttgaaaatggtcccgattacgatacatgtgtatcacgaattatagatgaatttgatgaattggcatacttatatattaaaaaagatgttgtacattatattaatgttgatcacattgaaagtctagaaattgaagaagtgacagagggacaacacattacttatgattttgaataa

SEQ ID NO: 6942 - DNA, 1329 bp, Staphylococcus epidermidis
ttgagtggtcattcacaatggaagacgtctaccggttttatattagctagcgcaggttctgcaataggattgggtgcaatgtggaagttcccatatatggcaggtatatacggcggtggcgcttttctattaatgtttttaatttttactatatttgtaggactaccactgttaattatggaatttacggtaggtaaaatgggtcgtacatatacaacgcaaatatataagaaattaacgggaaagaaatggcttaatattatcggatggaatggtaatttagccgtatttatactatttggtttttatagtgttattggtggttggattattatatatataggttatgtcatagcacaaatcatggtttttaaatcaagtacgctgacaaatattcaatttgaaacaatcattagtaatccatggttgactgttttaggtcaaggcatatttattttgataacaatggtaattgttatgttaggtgttgaaaaaggtttagaaaaagcttctaaaataatgatgcctctattatttatctttttaattatcgttgtagcacaatctttaactttagaaggtgctttagaaggtgtacgttatatactgcaacctcgtgttgaagatatgtctattcaaggtgtactatttgcgttaggacaatcgttttttacgctgtccctaggtacaaccggaatgattacttatgcaagctatgcacctaaaaatatgacgataaagtcttcagcactttcaattgtcgtaatgaatattttaatttctgtcttggctggattagctatatttcctgcgcttaaaacatttggttaccaaccccaagaaggccctggcttattatttaaggttttaccactagtatttagcgaaatgacttttggtacattcttttactttatatttttactattattcttatttgcggcattaacgtcttctatatcattattagagttaaatgtatctaattttactaaaaatgataatagtaaaagacaaaaagtggcaatcataggtagtatacttgtatttatcattagtatcctagcaacattatcttttagtagtctaagtcatttgcgttttggcgctggtacgatatttgataatatggattttattgtatctaatattcttatgccattaggggcactaggaacaacattagtggttggccaattactagataaaaaattattaaaagaaagctttgggaaagacaaattcaacctatttttaccgtggtattatttaattaagttcatcatgcctattgttattattttagtatttatagttcaattattttaa

SEQ ID NO: 6943 - DNA, 540 bp, Staphylococcus epidermidis
atgacgaaacaagatttatctttatctgtatttaccaatgaaaattataagaatcttcgttacacatcatctagttttagaaattctatgtatgatgaattagaggttaataaaagtcgttttaaaaactgtaattttaatgaaggtatttttaagaatatagaagcaatttgtaattgtaaatttacaacgtgcgggtttaataattgtattttcgaagatgttcatttttacaaaaaccaatttaaagattcaacatttgtgaatacaccatttgatcaatccgtatttaatagtactttattccaaaatgcaatgttcgatagcaatctcattcgtagcgtaaaatggactgatatcatttttaaaaacgtttctttcaaaaatgtagaaattgaaggaacaacatttaaagatgtaaaattcaaaaattgtgagttcaaaaatgtaattattactaattcaactatgtcgcaaaagttaatgaatgaattacaaaaacaagatgttactttagaaaatatagacacttctatttaa

SEQ ID NO: 6944 - DNA, 909 bp, Staphylococcus epidermidis; identical to SEQ ID NO: 4037

SEQ ID NO: 6945 - DNA, 1146 bp, Staphylococcus epidermidis; identical to SEQ ID NO: 4036

SEQ ID NO: 6946 - DNA, 1026 bp, Staphylococcus epidermidis
gtgattgaattcaaaaatgttaacaaagtttttcgcaaaaaaagagaaactattcaagctttgaaaaatgtatcatttaagattgaccaacatgatatttttggtgttattggttatagtggtgctggtaaaagtacattagttcggttagtcaatcaacttgagacagtatcagatggtcaagttattgttgatggtcatgagattgatacatataaagaaaaagatttacgtgatattaaaaaagatatcggtatgatctttcaacatttcaatttgcttaattctaaatcagtctataaaaatgttgcaatgccacttattttaagtaagacaaataagaaagaaattaaggaaaaagttgacgaaatgttagaatttgtggggcttgctgataaaaaagatcaatttccagatgaattatcaggtggacaaaaacaacgtgttgccatcgcaagagcattagtaacgcatcctaaaatattattatgtgatgaagcgacaagtgctctggatccagctactacaagctcaattttaaatttattaagtaatgtgaatcgaacatttggtgtgacgattatgatgattacacatgaaatgagcgtaattcaaaaaatttgtcatcgtgtagctgtcatggaaaatggcgaagtgatagaaatggggacagttaaagatgtctttagtcatccacaaacgaacactgcaaaaaatttcgtttcgacggtgattaacactgagccttcaaaagagttacgggcctcttttaactcgagaaaagattcaaatttcacagattataaactgtttttagactctgaacaaattcaattgccaatattgaacgagcttatcaacgagcatcatcttaacgttaacgtattattttcttctatgtcagaaattcaagatgaaacggtttgttatttgtggttgagatttgagcatgatgagtcatttaatgattttaaacttactgattacctttcaaaacgacatattcggtatgaggaggttatataa

SEQ ID NO: 6947 - DNA, 660 bp, Staphylococcus epidermidis
atgtttggttcaagtttagattcatctcaattattacaagctctatacgaaacattgtatatggtgactgtatcacttgtaatcggtgctttaataggtatacctcttggcatcttgttagtggtaactagaaaaaacggtatatggtcgaatacaatattgcatcaagtattaaatcctatcattaatattttaagatcaattccgttcattattttattaatagccatagtgccttttactaaattgctagttggcacatctatcggcacaacagcagccatagtaccactcacggtttatgtagcaccttatatcgcacgcttagtagaaaactcattactggaagtcgatgacgggattattgaggcagctaaagcaatgggtgcatcacctcttcaaattatacgttattttttattgccagaagcacttggttcattaattctagctataactacagctattattggtctcataggtagtacagcaatggctggtgctgttggtggtggcggtataggtgatttggctttagtgtatggttatcaacgattcgatacaattgtcattgtgattacagtcattgtacttattattattgttcaaattatacaaacgttaggtaactttatcgctagggttatccgtagaaattaa

SEQ ID NO: 6948 - DNA, 846 bp, Staphylococcus epidermidis
atgaaaaagattttaagttttttaatcgttgcaattttagttttatcagcatgtggcggtaataatggtaaaaaggtaaccataggtgttgcatccaacgacacgaaggcttgggaaaaagttaaagaattagctaaaaaagatgatattgatttagaaatcaagcacttttcagattacaatgttccaaacaaagcacttagtgacggggatattgatttaaatgccttccaacactttgcttttttagatcaatataaaaaagctcataaagataccaatattgaagcacttagcactacagtattagctccattaggtatttattcagataaagttaagaacattaaagatgttaaaaaaggtgcgcaagttgctattccgaatgatgtatctaaccaagctcgagcacttaagttattagaatctgcaggtttaattaagcttaagaagaactttggattaaacggaacaacaaaagatattgaaagtaatcctaaagatttaaaaattaaagctgttgatgcacaacaaacagcgcgtgcactttctgatgtggatatatcagttatcaataacggtgttgcaacaaaagcaggaaaagacgctaaaaaggatcctatttatttagaaaaagcaagttcagatgcagtaaaaccatatattaatgttgtagctgtcaactctaaagacaaagataataaaacctacaaaaaaattatagaactttatcattcaaaagaagctcaaaaagcattaaaagaagacactaaagacggtgaaaaaccagtagatctttctaaaaaggaaatcgaagaaatcgaaaatgagttggcaaaaaaataa

SEQ ID NO: 6949 - DNA, 975 bp, Staphylococcus epidermidis
gtgcaaaaaaaatatattactgccattattggaacaactgcccttagcgcattggcatcaactcatgcacaagctgcaacaacgcatacagtaaaaagtggagaatctgtatggtcaatttctcacaaatatgggattagtattgctaaattaaaatcacttaatggattgacttccaatttaatattccctaatcaagtattgaaagtatcaggctcatcttcaagagcaacgtcaacaaatagtggcacagtttatacagttaaagctggagattcattatcttctattgctgcaaaatacggtacaacttatcaaaaaatcatgcaacttaatgggttaaataactatcttattttccctggacaaaagttgaaagtttctggtaaagcgacgagttccagtcgtgcaaaagctagtgggtctagtggtcgtactgcaacatatactgttaagtatggagactcactatctgcaattgctagtaaatatgggacaacgtatcaaaaaattatgcaattaaatggattaactaatttctttatctatcctggacagaagttaaaagtgcctggaggtagttctagtagctcatcttctaataatactagatcaaacggtggctattattcaccaacttttaaccatcaaaacttgtatacttggggacaatgcacatggcacgtatttaatagacgtgctgaaataggaaaaggtatcagtacatactggtggaatgcaaataattgggacaatgcatcagctgctgatggatatactattgattatcgtcctacagtaggctcaattgcacaaactgacgctggttactatggtcacgtagcgtttgtagagcgcgtgaatagcgatggaagtattttagtttcagaaatgaactggagtgcagctcctggaaatatgacatatagaacaattccagcttatcaagtgagaaattacaaatttattcattaa

SEQ ID NO: 6950 - DNA, 1506 bp, Staphylococcus epidermidis
atgatatacacagtaacaaccacccttccattatcccatggtggtagaactcaagctttactcagacgaattaaactgttagatgaagaatttaaaattccaagtaaaattctcaccactaattatcatggtaattatcctagtatttataaaaaatacagacaagaaaacaaagttacagaaaatatacaattcgagaatatgtatgaatggttatcaaatttcaaactttttaaagtcccaaaaacattgattactaggaatccaaaatacattaaaacacctagaaagattaaaggacttattgataagcaaggaaaaaagagtggtcttattcattattataataatgaatgtcatgtgagatctcgaaagtattatggacagtctaatgttcttgaatatgaggacttcatttctcccacatcaggattgaaatatgagcgccatcaatataacttatacggccaacttcatagaaaagaatattattatgatgactcttctttaaaacatagcgacgaattatttgatactgagggctctatgtactgcaagagatatttcaaaactaaaccaaacagcaaaattaatggcgtagaaatatatagaaataaaaaactttataagacctttaaaaatgataaattattagctcagttttattttcagaatagattcaaaaatcaagatatcgtctttaatgatgctcgatttttagataaaccattacttaaacaaacgcaccaaacaaaaaatattcttgttttacatagctcgcatttatcaggggaccaaataaaaaaatcatatcgatttgctttaaatcaatcaaaaaatgtttataagtatattgttctcactcaccaacaaaagcacgatatacagcaacatttccatataagtgacgaccaattccaactagtaccacattttatcgaattagatacggaggtagaacaagattcctcaaacaatcaaaatcgctttatatatataggccgttttagcacagagaaacagattgatcatattattagagcttatcacaagtttttgcaaagtggttaccaaacagaattacatttatttggtagagatgaagataatcaaattccattgatgaatactttgatttcagaattaaaattatcggataaagttaaaatatttaaatataccaatcaacctttacaagaatttaagaattctaaagcctctctacttacaagtcaatatgagggatttggcttaacacttatggaaagtatagaaatggggtgtccagtcctatcttataacgttcgttacggtccaagtgaaattattcaaaacgggataaatggctatctcattgaaaaaaatgatattgatagtttatcaaaacatatgattaacatcattgagcacccactacaaaaagtaaaaaataaagacactttaaaatataacgccgcagtgaataattacaaacaacttatgcaaagcttagacttattaaaatag

SEQ ID NO: 6951 - DNA, 279 bp, Staphylococcus epidermidis
atggctaaacaagcaaacgcttcacgtttatcaagattattcaatgtagcaggattcattgtagatggttataacggaattcgctataatgctaagaataaacaacttgtctatttatcattaggtctaagcgcacttggaacaatcattgatttttacatttctattaaatctgcatctaaacttcgtaagttaagtgcacttggatcatttgcaatcaatggggtacgcttattcacaagttttaaaaaagttagagatgaatatgactatcactaa

SEQ ID NO: 6952 - DNA, 387 bp, Staphylococcus epidermidis; identical to SEQ ID NO: 4029

SEQ ID NO: 6953 - DNA, 120 bp, Staphylococcus epidermidis
gtgagtaagttgttacacagatgtgagaaagatatattttcatgggttaaagaatttacgtacactatcaaatataaaaaagaatatgacgaatatttattaaaaatgcaattactttaa

SEQ ID NO: 6954 - DNA, 786 bp, Staphylococcus epidermidis
atgagtgcaattactattttaggtttcttattattgttgataatggttattttcggaggtaaaaaaggactcatttcttttttcactttgtttttaaattttatcattcttgtaataagtattcttttaattatatatggtgtgccaatctatcttgtcacatttatattttgctttatcatagccgcaattaatttatttgtattaaatagttacaatgtaaaaacacaagcggcttttctaggtactttagtaacaatacttatattaatactcatgatatacttttcagttgagatgggtcacttacaaggttttgccaccgaacagcaggatgaaacatatgtgtattcaatgaatattggtattaatatggtacaatttatggtatttacaattgttcttgcagtgatagctgcagtcattgatttagcaataacaattagttcccctatgtatgaactaaatgagactaatccaaatttaaatcagcatcaattatttcagtctggtatgcgtgtgggtagagagatattagcaacttctgccaacaccatttatttagcatttttcggaggacaattaactttattcttctggttctttaaattaaaatattcatttggacacatcattaattcgaagatattcacacaggaatttatagctattttacttggtggtatcgccgttgcaattagcattcccattactgcatggattacagcatttatgattaaacatgtcagtcagaagaagactcttacgaatcaacaaaataaataa

SEQ ID NO: 6955 - DNA, 1113 bp, Staphylococcus epidermidis
atgcaatccaagaatttttttaaaacaccttttacttggatgatgataatctttagttgcctgtttttaggtacgttaatattcacgttttttaacgatagattttataatatgcctataggacaaatcactcaaattactgatatccaatcacaaaaggtaacagacgagcacaaaaataaagatattaagtacaaagagaagataacattcaagattctaaatggtgaattcaaggggcaaacaacgacgattccccaccaatatgtgaaatctcaagctgattcagaatcattttccaaaaatgacaaggttcttttacatatttctaaaaatcctaaagacgcaactattatagagaaaaaacgagatactattgttgtcataataaccggcttatttttacttactgttttagttgttggaaaaaaagtaggacttcaatctatattatctcttatcgttaataccattgccgttatgggagctattttaatacatgatcaatatggggctataagtttattctttttgatgacttgtgctattatcatttccacttctttcactttactacttgtaacaggttggcatagccgaaccttaattactattgtaagtacgctgattggtacgttcttatgtgttggaattaccgaagtcatcatcaaatttaccgggggaaatggaataaaatacgaaacaatcactttccttactctccctcctaaggatgtctttctagcttccgtactaataggtacacttggagcagtgatggatgtttctattactattgcaagtgggatgtacgaaattttaaaacgtagccctcaaatttccatgaaacgttgggctcttgccggaagacatatcggtcaggatataatgggaacaatgactaatatacttctcttttcatatctatctggtagcttacctatgtttctaatttatttaaaaaatgctaacactattacttatactatttcgatgaattggtcattagaagttgctcgagcattaactggtgggataggtatcgttttaactattcctataacaattgctttaatggaactatggtttaaactgcgaggtgttaatcaatga

SEQ ID NO: 6956 - DNA, 882 bp, Staphylococcus epidermidis
atggatataaaacaacttagatactttgtagaggttgcacgtcgagagcatatttcagatgcggcattagaactaaacattgcacagtctgcgattagtcgtcaaatcactcaactcgaaaaagaattgggggtgacattatttaaaagaagtgggagaaatatcatattaactgttgaaggtagacagttactctcacaggcaactcaaatactagaattaatggataaaaccattcactcatttcaacaacacgtatcacataaccaacagacaatttatattggatatgaagaaagtgatgcctctcaaatgattcttcccctaattcaaacatttgaacaacaaagtaacagtaccatgattccgcaacttacaaaacatgataaattattagatcaaatcctttccaatcaattggatcttgcaatcactgaatttactcctgtgttagaacgggaaacacatttacgcgtcatgcctttatttgaagaaaattattatatgtatgtgcccaaatcacatccactagctatgactgtacatcccccgctatctcaatttacaaatcaatcactatactgtctcgaaccaatgacaagctcaataaaaagtaaattgattgaaaagactaaggcacaagtacgaatgatttcagatatgaaactcgctcaacatattttgagtcataataagggatttattatttctagtcaaaattctttactatatgatcacgtaaattggactaaaatccctttaaatcatacagaattaaaacgaatgctatgtgtagttatgcgaaaagataacaagaaaaacgacattaatatagcatggaatttaatttacacattattaaataaatcaactatatattaa

SEQ ID NO: 6957 - DNA, 4497 bp, Staphylococcus epidermidis
atgtacaatgagaaattaaaaaagggactatacgattatcgtgaagagcatgatgcgtgtggtattggattttatgccaatatggataataaaagatctcacgatattatagaaaaatctttagaaatgttaagacggttagatcatcgtggtggagtaggtgccgatggtattactggtgatggtgcaggaattatgacggagataccataccaattgttcgaacaattaacagaattcaaagttcccggcgaaggatattatgccgtgggattatttttttctaaagagaaagttagagattcaattcacgaagagatgtttaatcaatattttgaaagtgaaggttttaaagtcattggatatagagatgtgccagtagatactcgcgctattgctcaacatgttgcagatactatgccttatattcaacaagtatttgttgacatcacaggtgtaaaagaagttgaaaaacgattgtttttagcaagaaagcaaattgaaaaatatagtgaaacacaatccatagatttatattttacaagtctctctcatagaacgattgtttataaaggttggttacgttcggatcaaattaaaggcttatatttagacctacaaaatgaggcatatcaatcaaaattaggacttgtacactcccgctttagtactaatacatttccaagttggaaacgtgcacatcccaatcgcatgcttatgcacaatggtgaaattaataccattaagggtaacgtaaactggatgcgagcacgccaaaataaactagttgaaacattatttgaagatgagaaagataaggtgcattttattgttgatgaagatggtagtgactcatcaatagttgataatgcgttagagttcttatcattagcaatggagcctgaaaaagcagcgatgttattaattccagagccatggttatacaatgaatctaacgataaaaaagttcgctctttctatgaattttatagttatttaatggagccatgggatggaccaactatgatttccttttgcaatggagataagataggtgcattgactgatagaaatggattaagacctgggcgttatacaataactaaagacaattttattgttttttcttccgaagtaggtgtcattgatgttccagaagaaaatgtagcatttaaaggacaacttaatcctggaaagttattacttgtagactttttgcaaaataaggttgtagaaaataatgagctaaaaactaatattgctaatgagttgccctacgaacaatggctaaaagattataaaaataaaaatgatttagataatatttattaccaatcttccgactgggatgatcaaacactcttccgcttacagaaacaatttgcttacactaaagaagatatcaataaatatatgacagatttagtcatcaataaaaaagatcccatcggagcgatgggatatgatgcacctattgcagttcttaatgataagcctgagtcactatttaattattttaaacaattatttgcacaagttaccaatccacccatcgatgcttatcgagaaaagattgtaactagtgaactttcatatttaggttcagaagggaacctcttatgtcctgatgaatcagttttagaaagaattcaattaaaaaaaccagttttaaatgaagcgcaattatcatcaatcgatcattcgtattttaatgtaacgtatttatctacactttatacaggtgatttggaaagtagcttaaatgaactagggaaccgagcaatacaggctgtacatgaaggtgcgaaaattttggtgttagacgatacgtctttaactcacgaaaatagttatgcaatgccaattttattagcgttaagtcacgtgcatcaattattaattcgagaaggattaagaatggagaccagcctcattgcgcagtccggtgaaacacgagaagttcatcacgttgcatgtttacttggttatggtgcaaacgctgtagttccatatttagcgcaacgaacgattgaacaattaacgcgtcaaggtcaactttcaggaactgtcgctgaaaatgttgctacgtataccaatgtattgtcagaaggcgttattaaagtgatggctaaaatgggcatttctactgtacaaagttatcaaggagcacagatatttgaagcggtaggtttatcgaatagcgtcattgaaaaatattttacaggtacacagtcaaaattatctggtataagtattgaacaaatagacaaagagaataaagcgagacaaagtgatgattctgattatcttgaatccggaagtgtattccaatggagacagcaaggtcagcatcatgcatttaatcctcgtacgatttttttattgcagcatgcatgtagagaaaatgattacgagttatttaaaaaattctccaaaactgtaaatttaaaacgtacggatcatattagacatttattagaattcaagacacgccaatctattgatattagtcgtgttgaaccagcaagtgaaatcgtaaaacgttttaatacaggagcaatgagttacggctctatctcagcagaggcacatgagacgttggctcaagctatgaatcaaattggaggtaaaagtaatagtggagaaggtggagaagattcttcacgttacgaaattcaaaaggatggaagtaataagataagtgcgattaagcaagttgcatcaggtcgttttggggtgacgagtgattacttgcaacatgcaaaagaaattcaaattaaagtcgcacaaggcgctaaaccaggggaaggtggacaactaccaggttcaaaagtatatccatggattgctgagactagaggttcgacaccaggtataggattaatttcaccaccaccacaccatgatatttattcaattgaggacttagcacagctcattcatgatttaaaaaatgcaaatagaagagctgatattgcagttaagcttgtatcaaaaactggcgttggaactatagcttcaggggtagctaaagctttcgccgataaaattgttataagtggttatgatggaggtacaggtgcatcgcctaaaacaagtattcaacatgcaggtttgccatgggagataggccttgccgaaacacatcaaacacttaaattaaatgatttgcgtagtcgcgtaaaattagaaacggatggtaagttactgacgggtaaagatgtagcttatgcttgtgcgcttggtgcagaagaatttggtttcgcaacagcaccacttgttgttttggggtgtattatgatgagggtttgtcataacgatacgtgtccagtaggggttgcaacacaaaacaaagatttaagagctttgtttagaggtaaggcacagcatgtagttaactttatgtattttatagctgaagaattacgtgaaattttggcttcacttggtttagaaacagtagaagagttagtaggaagaacagatcttcttcaacgttcgacgcaattgaaaccaaatagtaaagcagcttcgcttcaaatagaacgtttaatagaacaatttgacggggttaatacgaaagagatatcacaaaaccatcatcttgatgaaggattcgatttgaattatctgtacccagacgcacgctatagtattgaaaacgggcactcttttaccggaaattatgttgttaataatgaacagcgagatgtaggtgtaattacaggtagtgcgatagctaaacaatatggagaagaaggattacctgaagatacgatacttgcttacactgaaggtcatgcaggtcaaagcttagctgcatatgcaccacgcggattaacaatccatcataccggtgatgctaatgactacgtaggtaaaggattgtccggtggaactgtcatcgtaaatgctccaaatagtcaacgtgaaaatgaaattatagcaggaaatgtaaacttttacggggcttctagaggtaaagcgtttatcaatggtaaagctggtgagcgtttctgtatcagaaatagtggtgcagatgttgtagtagaaggtattggtgatcatggacttgaatatatgacagggggacatgtcattatcttaggagatgttggaaagaactttggccaaggcatgagcgggggcgtaagttatattttcccttctgacgtggagaaatttaaaaaggttaatgcgcttgaaactttagaattcagtagcatacgttttgatgaggaaaaatctcttatcaaagacatgcttgaagcacattttaagcatacacgtagtaacaaagcacgccaattacttgaccaatttgacaatattgaaaagttagcaattaaagttattccgaaagattacaaattaatgatgcaaaaaattgatttgaaaaaacgtcaaatggaacgtgaagatgaagcaacactggcagcgttttatgatgacagagaaacaattgaacgagagctacagccagcagtcatttattaa

SEQ ID NO: 6958 - DNA, 1464 bp, Staphylococcus epidermidis
atgggcgaatttaaaggatttatgaaatatgataaacagtcgctatcagaattgtctttggtagaccgtctttcgaatcatgaagcgtttcaacaacgcttcactaaagaagatgcttcgattcagggtgcgcgctgtatggattgtggaacacctttttgtcaaactgggcaatcttatggaagagaaacaataggatgccctattggtaattatatacctgagtggaacgacttagtctatcatcaagattttaaagctgcttacgaaagattgagagagacgaataattttcctgaatttacaggaagagtttgtcctgcaccatgtgagcaatcatgtgttatgaaaattaatagagaatccgtggcgattaaaggtattgaacgtacaattattgatgaagcatatgagaatgagtgggttcatcccgcatatcctgaagatcataaagaccaacgagttgctatcgtaggtagtggtccagcgggacttacagcagctgaagaattaaactttaaaggctataaagttactgtttatgaaaaggcgcatgaaccaggcggcttgctaatgtatggtataccaaatatgaaactagataaagacgtaatacgtcgacgtgtatcacttatgaaagatgctggggttttatttaaaacaggcgttgaaattggcgtcgatgtgagccgtgaaacacttgaagaaaattatgatgctattattttatgcacaggtgctcaaaatgcgagagatttaccattggaaggacgaatgggctctggtattcattttgcaatggactatcttactgaacaaacacagtatctaaatggtgagattgaaagtttgagcattactgctaaagataagaatgtaattattataggtgctggtgatactggtgcagactgtgtagcgacagcattacgtgaaaactgtaaatctattgttcaatttaataaatatacgaaacagcctgaagagattacttttgaaagtaatacttcctggccattagcaatgcctgttttcaaaatggattatgcgcataaggaatatgaagctaaatttggtcaagaaccaagagcctatggtgtacaaacaatgcgctatgatgttgacgagttaggaaatgttaaaggcttatatacacaaatattaaaagaaacgcctgatggcatggtgatggaagatggaccagaacgattttggccggctgatttagtcttattatctatagggtttgttggtactgaaaccactgttccgcatgcgtttgatatacacaccgagcgtaataaaattgtagctaatgatacaaattatcaaactaatcacgctaaaatatttgctgcaggagatgcaagacgaggtcagagtttggttgtttgggcaataaaagaaggtcgtgaagtagcacattctgttgatcaatacttaagtaaagaagttctagtgtaa

SEQ ID NO: 6959 - DNA, 822 bp, Staphylococcus epidermidis
atggatccgtataaggtattaattgaagtaatgaaaacagaaagttttactagagcagcagaaaatttatatacttcgcagccttctgtgagtcgtgatattaaacgtttagaattaaaatataatgttaaaatatttgaatttaaatctccatatttaaaactaactagagatggcgaaaagctattacaatacgcattgcaacgggaaagtattgaacaagaattatggcaaaacttaacatcggaatctgaaatcatctcaggcaccttaacaattggaagcagttatacatatggtgaatatttattatcagaacagcttaccagtcttatgcaacaataccctaagttacatattcatttacgtgttaataattcagattctgttataaatgatattaaacacaacagagtagatataggtattgtagaaaaggaaattcaagacaatgcaataaaatgtaaggaaataatggaagacgaaatggtgtatatttacaaaaaatcgattcaacctagaatggatatatgtttcgttagagaaaaagggtctggaacaaggttttatcaggaagtaggtctttctgagttgaaattaaatccatatttgatagaaattaacaatattaagattattaaacaaatggtagaggctggaaatgggtttgcaattatttcaaaatcagcacttcatccagaagattatgaaaaattaatgataacaactttaaatgtgaaacgtcactattaccttgctcaacatgttgataaatatataggtgaaaatattagagctgtcattgaaatgattatgaagtag

SEQ ID NO: 6960 - DNA, 996 bp, Staphylococcus epidermidis
atgaaatcaataacgcaggcttcatttatgaaaggtattatgtttacatttacgattgcaataatcagttatatattagctaaatttcctattttacatacgattggggcgttagctattgccatcatttttgcgatgatataccgccaagtcataggttatcctgagcatattcgtccaggtattacgtttgcatcgaaacgtttattaaaatttgcgattatcttatatgggttaaaattaaatatgggagatattctaggtaaaggttggaaattactacttattgatattatcgtaattatcttttcaataagtttaactttacttttgaatcaaattattaaaggaaataaagatatctctatactacttggtattggtacaggagtatgtggagctgcagctattgcagctacagcaccaatcttaaaatctaaagaaaaagacattgcaataagtgtaggtattattgcactagttggaactatatttgcacttatttatacagctatcgaggctatttttaacatacctactataacttatggtgcttggacaggtatcagtctacatgaaatcgctcaagtcgttttagcagcaggtattggcgggtcggaggcaatgacatttgctttacttggaaaattaggccgtgtgtttttacttattccattaagtattgtcttaattttgtatatgcgttataagtcacactcaagtcaagtacaacaaaaaatcgatattccttactttctaattggatttattataatggcttgtatcaatacatttgttcctattccttcattacttatgaatattataaatgttattacaacgttatgtatgttaatggcgatggttgctctaggattgaatatcgttttaaaagaagttatttcaaaagcacttaaaccattcattgtgatctgtataacttcaatttgtctgtctggtgtgactctcttagttacgtctataatgtttaaataa

SEQ ID NO: 6961 - DNA, 531 bp, Staphylococcus epidermidis
atgcatatttatttaagtactttaacagaggtcgattatgaaacgtcactaaatagtatagaaaataattataatctaaatccagaatccagttggcaagatcgagcgcgcgttaaaaatctaagaaaacttgaaagctacaattatgaattagaagttatagctaagaatgaattgaatgaagttataggtcacgttgtgttagcagaggttaagttgtcgtctaaaaacaaaaaagcgatagcgttagccattggtgcactgtcagtagataaatctattcgaaaccaaggtttaggtcaagccctgttaaaagctgtagaagaacgtgctaaagaacaaggctattgtgctatttttgtaaataatcatcctcagtactttgagaaatctgattatgaagcagcccatttatataatatacatatagaagaaaaacgaaatcatcaatcattattagtaaaatttctaaaaccagttcaaaatgaatggtctggaatgacggtgtattatccggaagtactggattga

SEQ ID NO: 6962 - DNA, 1707 bp, Staphylococcus epidermidis
gtggattaccaagctttgtatcgtatgtatagaccgcaaagttttgatgatgtggttggacaaacgcatgtaactaaaacgctgcgtaatgcaatttcaaaaggtaaacaatcccatgcatatatttttagtggtccgagaggtacgggtaaaactagtattgcaaaggtttttgccaaagctattaattgtcttaatagtgacgatggtgaaccttgtaatgaatgtgcgatttgtaaaggaatcacacaaggtacgaataacgatgtaattgaaattgatgctgcaagtaataacggtgtagatgaaataaggaatattagagataaagttaagtacgcacctagtgaatctaagtataaagtatatattattgatgaggttcatatgttaactactggtgctttcaatgctttgcttaaaacattagaagaaccaccagcgcatgctatatttatcttggcaacaacagaaccacataaaattccacccactattatttcgagagcgcaacgatttgactttaaagcaattagcagtgaccaaattatagatagacttaagtatgtagctaattctcaatctttggattacgatgacgcagcattagaatttattgctaaagcatcagaaggtggtatgcgagatgcattaagcattatggatcaagcaatagcgtttggagacgaacgacttactttacaagatgctttaaatgttacaggtagtgttgatgaagcggcattaaatgagttatttaatgacattgtaaaaagtgatgttaaagccgcatttaatagatatcatcattttatttcagaaggtaaagaagtcaacagactcattaatgatatgatttactttgttagagatacaattatgaataaaacgtctaacgaatccgttcattttgaatcacttattcatttcgacttagatatgttatacaggatgatagatatcatcaatgatacactagtatccattaggttcagtgtaaatcaaagtgttcattttgaagtgttgctagttaaacttgcagaaatgattaagacacagcctcaaactgtacaaaatgtagcaacagcatcggtagctaatgaaccagataatgagatgttattacaacgtttagaacaacttgaaaatgagcttaaaaccttaaaagaacaagggatcaaaactaataaagttagtcaacaacctaagaaaccaacacgtacgattcaacgatctaaaaatacgttttctatgcaacaaatagcgaaagtattagacaaagcaaacaaagatgatatcaaattgttgaagaaccattggcaagaagtgattgatcatgcaaaaagtaatgataaaaagtctttagtaagtttgctactgaattcagaaccagtagcagctagtgaagatcatgtgttagttaaatttgatgaagaaattcattgtgaaatagtaaataaagatgatgaaaagagaaacaatattgaaagtgtagtttgtaatatagttaataaaactgtcaaagtagttggagtgccggctgaccaatggctgagagtgagagcagagtacttacaaaatcgtaacaccaatgaaacacatcaaagcgaaaaacaaagcacacaacagtctcaacaaatagatattgctcaaaaagctaaagacttatttggtgaggaaactgtacacttagttgatgaagactga

SEQ ID NO: 6963 - DNA, 318 bp, Staphylococcus epidermidis
atgcgcggtggcggaaatatgcaacaaatgatgaaacaaatgcagaaaatgcaaaagaaaatggctcaagaacaagagaaattaaaagaagaacgcgttgctggaacagcaggcggaggtatggtgactgttactgtaacaggtcataaagaagttgtggatgtagaaattaaagaagaagctgttgatccagaagatattgagatgcttcaagatttagtattggcggctacaaatgaagcgatgaataaagcagatgagttaacacaacaacgtttaggtaagcatactcaaggcttaaacatccctggaatgtga

SEQ ID NO: 6964 - DNA, 597 bp, Staphylococcus epidermidis
atgcattatccagaacctatatcaaagcttatcgatagttttatgaaactgccaggcattggaccaaagacggctcaacgtctggcttttcatactttagatatgaaagaagacgatgttgttaagtttgctaaagcactagttgatgttaaaagagaacttacctattgtagtgtttgtgggcatattacagaaaatgatccttgttatatatgtgaagataaacagcgagatcgttctgtcatatgtgtagttgaagatgacaaggatgtcatagcaatggaaaaaatgcgtgaatataaaggtttatatcacgtgcttcatggttcgatttcaccaatggatggtattgggcctgaagacatcaatatacctgcattagttgaacgcctcaaaaacgatgaggtgaaagagcttatattagctatgaatcctaacctagaaggcgagtctactgcaatgtatatatctagattggttaaaccaattgggattaaagtcacaagactggcacaaggtttatctgtaggcggcgatttagaatatgctgatgaagtgactttatctaaagcaattgcaggtagaacggaaatgtaa

SEQ ID NO: 6965 - DNA, 579 bp, Staphylococcus epidermidis
ttggggtcagtctatattctcggtggcgtttttatcagggttctagattatattattccccatattcaccaaaatgcccaagataaaaaccaacaacaagagggtgtgcctacctctcttggaaaaaatgcattacttgtgttagctatcacacttcacaacatacctgaaggactatctatcggagttgcattcggtggtgttgtatctggcaacagtcacgctacatttttaggtgcgattggtctagcgataggtatcggcatacagaatattcctgaaggtgcagcactatcgatgccaatccgtgctgcaggtgcaacacgttggaaagcatttaattatggacaagcttcagcaattgttgagcctattttcgctactatcggtgctgcagcaattttagtggtaaatcctatattgccttatgcattggcgtttgctgcaggtgcaatgattttcgttgttgttgaagaactgatacctgattctcaatcaagtaacaacactgatttggcaactttaagtctaatgattggttttacaattatgatgattcttgacgttgcacttggataa

SEQ ID NO: 6966 - DNA, 267 bp, Staphylococcus epidermidis
atgaaagcagcaggattttcaacaaaagaaattatgaaagaattaaatattagaaatagaacacaagtgaaaacttggtggagatggtatcgaaatggggaaagttatagattttcacaacaagttggtaaacaatatacctacggtaaaggattagaagagctgtcagaagtagaacaattaaaattagaaaataagagaaaagatatagaattggatattttaaaaaagtacaaggcattggaaaggaagtggtaccaacagtag

SEQ ID NO: 6967 - DNA, 150 bp, Staphylococcus epidermidis
ttgcaacagaaccatttagacgatgccgaagaaggtaatttaattcaaacgagcgatgaagaaaaaacgactgaagaagaacaaaaagcccattcaattacggccatttggaattttgaaaaacaaaattatttcttaaaaaatttgtaa

SEQ ID NO: 6968 - DNA, 117 bp, Staphylococcus epidermidis
atgtggaaatggatatttggagctattgaggcctatggtgaagaaggaaatatcatccctaaaaaactagacgaaagcattctcggaatcttgtttgccatgtgtgtactcaactaa

SEQ ID NO: 6969 - DNA, 114 bp, Staphylococcus epidermidis
atggttacaataactatagcaactacaataactacagtaattacaacaattacaacaactatcaatcaaacaacacgcaatcacaaagaacaactcaaccgactggtggtttag

SEQ ID NO: 6970 - DNA, 153 bp, Staphylococcus epidermidis
atgctcccaagcacagagtcacaagcagcagggggagcagctgggcctttcgtatttttcttattagtcttactgccttggagcgtaatgattttggtaacagtaaccattgaagaacagcctctgccttactcagtgttactcaaagtgtag

SEQ ID NO: 6971 - DNA, 483 bp, Staphylococcus epidermidis
atgtcatctgacacaaacagtttagcacatacaaaatggaattgtaagtatcacatagtctttgcaccaaaatatagaagacaagtgatatacggaaaaatcaaaagagatattggagttattttacgtcaactatgtgaaagaaaaggcgtagaaataatagaagcagaagcatctaaagatcatattcatatgttagttagtattccacctaaattaggagtatcctcatttgttggatatttaaaaggtaaaagcagtttaatgatttttgatagacatgctaatttaaaatatagatatggaaatagaaagttttggtgtaaaggattttatgtagatacagtaggtagaaataaaaaggtaattgaaaattacattcgtaatcaattacaagaagagatcgttgcagatcaaatttcaatggaagaatacctagatccctttacaggagaagaaattaaaaaaagacgaaaaaaatag

SEQ ID NO: 6972 - DNA, 522 bp, Staphylococcus epidermidis
gtgggtgcctgcaaaccacgagccgatcatgaccgatccggcacctgcggcaagggcgagggcaacgtcgcgggggtgacgcacacctccgtcagcccagatagcaccatcaacttcggcagcagcctcggcacattccaatactgccgaaaactgcgcgcgtcccacaccggtctgcattcgagtggtgcacattgcgcccggtccaacgccgaccttgacgatatctgcgcccgcctccagcaggtcgagagtgccgcttcgggtaacgatattgccggcgacaatgggaacccgtcggccggtctttgtttcaaacgctgtgcggacctcgtcggcgatcccgatagcacggatcatctggtcctggtggccatgggcggtgtccatgacgagcacgtccgaaccagactccagagagttacgagcacgtcccgcgacgtcaccgttaatgccaattgcagtgccgatcatgaggcgtccgtccggatccacagcaggacgatagatttcagtgcgtaa

SEQ ID NO: 6973 - DNA, 144 bp, Staphylococcus epidermidis
atggactcaaatggaattatcctcaaatggaatcgaatggaattatcgaatgcaatcgaatggaattatcgaatgcaatcgaatagaatcatcgaatggactggaatggaatcatcgaatggaatggaatggaacagtcaatga

SEQ ID NO: 6974 - DNA, 1218 bp, Staphylococcus epidermidis
atgactgtattgagtgagcaagacaaaataagattattagctgatatcgtcaagattcaaactgagaatgatcatgaaattgaagtatgtgagtacttaaaagacctgttaagtcaatatgatattgattctaagattgttaaagttaatgattcacgcgctaatttagttgctgaaattggtagtggcgctccagtcttagcaatcagtggacacatggatgttgtagatgctggtgaccatgatgattggacttttcctccatttgaactcacagataaggatggcaagttattcggcagaggtaccactgacatgaaaggtggtcttatggcgatggtcatcgcgatgattgaattgaaacaatcaaacgcattaaagcaaggtacgatacgtttattagctactacaggagaagagacggaacaatatggtgcacaattacttgctgatgaaggttacttagatgatgtgagtggtttaattattggcgaaccaactagtaatatcgcttactatgctcataaaggttctatgagctgtgtagtcacagcgaaaggtaaggctgcacatagttctatgccacacctaggtacaaatgctgttgatattttagttgattttgtaaatgaaatgaaacaagaatataaaaatattaaagagcatgataaagtacatgagctagacgctgttccaatgattgagaagcatctccatagaaaaattggtgaagaagaatcacatatctactctggatttgtaatgttaaactctgttttcaatggtggtaaacaagttaattctgttcctcataaagcgacagctaaatataatgtaagaactgttccagagtatgacagtactttcgtgaaggatttatttgaaaaagtcattcgtcatgtgggtgaagattatttaactgtagatatacctagcagtcatgatccagtggcaagtgatcgtgataatcctcttattcaaaatattacacgtattgcaccgaattatgtacatgaagacattgttgtgagtgcattgattggtacaactgatgcatctagttttctaggaacaaatgaaaataacgtagattttgctgtctttggacctggtgaatctattatggcgcatcaagttgatgaatttattagaaaagatatgtatttaagttatattgatgtttataaggatgtatttaaagcatatctagaaaaataa

SEQ ID NO: 6975 - DNA, 756 bp, Staphylococcus epidermidis
atgcttaaaggacacttacactccgttgaaagtatgggcactgtcgacgggccaggacttagatatatattatttactcaaggttgtttgttaagatgtttatattgtcataatccagacacttggaagattaacgaaccatcaagagaagtgacggttgatgaaatggtaaatgaaatcttgccgtacaaaccttactttgaagcttcaggcggtggggtaacagtcagtggtggcgaaccattactacaaatgcctttcttggagcaattattcaaagaattaaaagcaaatggtgttcacacttgcattgatacttctgcgggctgtgtgaatgatacaccagcatttaatcgtcattttgatgaattgcaaaagcatacagatttaatcttattagatattaaacatattgataatgataagcacatcaaattaacaggcaaacctaacacacatattttaaagtttgcacgtaaattatctgatatgaaacaacctgtttggattagacatgttttagtacctggtatttcggatgataaagaagatttgataaaactaggagaatttattaattctttagataacgttgaaaagtttgaaatcttaccatatcatcaactcggtgtgcataagtggaaaaatttaggcattccttatcaactcgaaaatgttgaaccgcctgacgatgaagcggttaaagaagcttatcgctatgttaattttaatggcaaaatacctgtaacattatag

SEQ ID NO: 6976 - DNA, 2247 bp, Staphylococcus epidermidis
atgttagaaacaaataatcatactaatgcttggcaaggatttaaaacaggtcgttggaataaaaatatagacgtgagagaattcatacaattgaactattcattatatgaaggtgacgatgaatttttagaaggtcctacaaaagcaactgaaactttatgggatcaagtaatgcaattatcaaaagaagaacgtgagcgcggtggcatgtgggatatggatactaaagtggcatcgacaatcacttctcatgacgctggttacttagacaaagatttagaaaaagttgttggtgttcaaactgaaaaaccattcaaacgttctatgcaaccattcggtggtattcgtatggcaaaagcagcatgtgaagcgtatggttacgaattagacccagaaacagaaaaaatcttcactgaatatcgtaaaacacataaccaaggtgtattcgatgcatattcaagagaaatgttaaattgtcgtaaagctggtattattactggtttaccagatgcttacggacgtggacgtattatcggagactatcgtcgtgttgctttatacggtgtagacttcttaatggaacaaaaacttaaagactttaacacaatgtccactgaaatgtctgaagatgtgattcgtttacgtgaagaattatcagaacaatatcgctcacttcaagatttaaaagaattaggacaaaaatatggatttgatattagccgtcctgctactaacttcaaagaagctgtgcaatggttatacttagcatatttagctgctattaaagaacaaaatggtgcagcaatgagtttaggacgtacttcaacattcttagatatttatgctgaacgtgatttacaaaatggtgacatcactgaacaagaagttcaagaaatcattgaccacttcattatgaaattacgtatcgttaaattcgcacgtacgcctgaatataatgaattattctctggagatccaacttgggtaactgaatctatcggtggtgtaggtattgacggccgtccgatggtaactaaaaactcattccgtttcttacactcattagataatttaggtccagcaccagaaccaaacttaacagtattatggtctacacgcttacctgaaaacttcaaaatctattgtgctaaaatgagtattaaaacgagctcaatccaatatgaaaatgatgacttaatgcgtgaaagctatggcgatgattatggtatcgcttgctgtgtatctgccatgaagattggtaaacaaatgcaattcttcggtgcacgtgctaacttagctaaagcattactttacgctatcaatggtggtaaagatgaaaaatctggcaaacaagttggaccaagttatgaaggtattaaatcagacgtactagattatgatgaagttttcgaaagatatgaaaaaatgatggactggttagctggcgtatacatcaactcattaaatatcattcactatatgcatgataaatacagctatgaacgtcttgaaatggctttacatgatacagaaattattcgcacaatggcaactggtatcgctggattgtctgtggcagctgactctttatcagcgattaaatatgcacaagttaaacctatccgtaacgaagaaggtcttgtaactgactttgaaatcgaaggcgacttccctaaatatggtaataatgacagtcgtgttgatgaaattgcagtagatttagttgaacgtttcatgactaaattacgtagccataaaacataccgtaattctgaacacacaatgagtgtattaacaattacttcaaacgttgtttatggtaagaaaactggtaacacaccagatggacgtaaagctggcgaaccatttgcgcctggtgcaaacccaatgcatggtcgtgaccaaaaaggtgcattatcttcactaagttctgtagctaaaataccttatgattgctgtaaagatggtatctcaaatacatttagtatagtaccgaaatcactaggtaaagaagaagcagatcaaaataaaaacttaactagtatgttagatggttatgcaatgcaacatggtcatcacctcaatattaacgtgtttaatagagaaacattaattgatgcaatggaacacccagaagagtatccacaattaacgattcgtgtatctggatacgctgtaaacttcattaaattaacacgtgaacaacaattagatgttatttcacgtacattccacgaatctatgtaa

SEQ ID NO: 6977 - DNA, 1191 bp, Staphylococcus epidermidis
atgaaaggtgccatgtcttggccttttttaagattatatattttaacattgatgttttttagtgcgaatgccatactcaatgttttcatacctctaagaggacatgacttgggggcgacgaatactgtaattggaattgtaatgggagcttatatgctaacggcaatgctatttcgcccctgggctggtcaaattattgcacgtattggtccgattaaagtattgcgtattatattattgattaatgctatggcactggtattatatgggtttacaggacttgaaggttatttgattgcacgtatcatgcaaggtgtgtgtacggcattcttctcaatgtctttacaattgggcattatagatgctttacctgagaaatatcgttcagaaggtgtatctctctattcattattttcaacgattcccaatttattaggaccattaattgcagttgggatttggcacgttgaaaatatgtccatatttgctattgttatgatttttattgcagtaacaacaaccttatttggttatagaactacttttgcaaatacacaaaaaaaggtatcaccaaaagacgaagtcttgccttttaatgcaatgactgtatatgtccaattttttaaaaataaagcactcttctgcagtggtatgattatgatcttgtcatctatcgtgtttggtgcgatgagtacttttataccattatatacggttagggaaggtttcgcgaatgcaggtattttcctcacaattcaagccattacagtagtgatagctagattttatttacgtaagtatgtaccatctgatggtttatggcatcaccgttttatgatgattgtcttaacgttactgatggttgcgtcaatcattgtagcttttggaccacatatagtgagtatatttgtatatataagtgcaatctttattggaataacacaagcgctcgtttatcctacattgacaacgtatttaagttttgtcttaccaaagataggacgtaatatgttattaggattgtttatagcatgtgcagatttagggatttcactaggaggtgtgctaatggggccaatatcagatacggcaggatttaaatggatgtatattttatgcgctttattggttactattgcaatgacactaagtaaaattagacaaagacaaagtgtttcaaaagcctcatag

SEQ ID NO: 6978 - DNA, 750 bp, Staphylococcus epidermidis
atgcttaaggttcaaaatgttattaaattttatggaaaaaaatcaatgtttcgtgataaacgtattcctgtagttaaaggcgtgtcatttgattgccccactggtgcatcagtagcaattattggtgaaagtggaagtggaaagtctacgttgagtcgtatgattttaggactagaaaaaccagatcaaggacaagtgactttggatggtcagcctgttcatttaaaaaaagtaagacgtcatcgaattgctgcggtttttcaagactatacttcttctttgcatccttttcatactgtcaaagatattttgtttgaagtaatgaatcaatgtcgatgtacatcgaaggagaatatggaagagtatgtaacattgttactacgtgaagtaggactaaaatctgattgtttgtattgttatccacatatgctttcaggtggagaagcacagcgtgtagctattgcacgtgcgatatgtatgcaaccagattatatattatttgatgaggcgattagttcattagatatgtctatgcaaacacaaatattagatttattgaaaaggttacgtcactcacaccagctaagttatatctttattactcatgatatacaagctgcgacatatatatgtgatgacttgcttatttttaaaaatggttgtatcgaagctaggacatctataagtgaattgcataggcaacaaaatggttatacaagagaactgattgataaacaactatcaatctaa

SEQ ID NO: 6979 - DNA, 816 bp, Staphylococcus epidermidis
gtgacactgcttaaagtagcacatttaggaattaaggacacatggtcagatgagacgctcgttgataacgtgaatttcacagttcaatgtggagaaacattaggtattattggagaaagtggaagcggaaaatcgattacttgtaaggcattaataggtttaaacgctcaacgtttatctgtaagcggagatatcttttttgaacatcaaaatttaaatacaataactgaaaagcaactacgcaaaattcgtggtaaagatattgcgatgattatgcaacaaggaacacgggcatttgatccttcaactaaagtgggaaagcaaatgattgaaactttgcgtgcacatacgacattatcaaagcaacaaataaaacaagaacttattcattatatgacgtatatgaagttgaaagatcctcagtcattattaaaagcatatccctacatgttgtcaggtgggatgcttcaacgtatgatgattgcactagcattagcattgaaacctaaattgatcattgctgatgagccgaccacagcattagatactatcacacaatatgaagttatcaatgcttttaaagatataaaacatcattttgattgcgccatgatttttatatctcatgacctcacagtgattaataaaattgcagaccgtgttgtagttatgagagaaggtcgtgtgatagaagaaggtcgaacaaatatggtattacaacaacctcgtcatcactatacagcttatttattatcaactaaaaagacaatttatgattattttcagttagtgctcaggggtgatttaaatgcttaa

SEQ ID NO: 6980 - DNA, 879 bp, Staphylococcus epidermidis
atgattgtgttacgtcgtctatttcaagatagaggtgccatatttgctatagctattattacaatctacgtagtgcttggagttttagctcctttaattacattctatgaaccgaatcacattgatacagcaaataaatttgctggtataagttggtctcactggttgggaacagaccatttaggtcgagatgtattaacacggataatatacgccataagacctagtttgttatatgtatttgtcgcattgattatttccgttgcgataggagcgatacttgggtttatttcaggttatttcccaggttatatcgatgcaataattatgcgtatatgcgatgtgatgttagcttttccaagctatgtggtgacattggcattgattacgttgtttggcatgggtgtagaaaatattattattgcgtttatattgactcgatgggcgtggttttgtcgcgtgattcgaaccagtgtaatgcaatatattgaagctgatcatgtaaaatttgccaaagtaattggtatgaatgatttaacaatcattcgcaaacatattttgccactaacctttactgacatagcgattattgctagtagttcgatgtgttcaatgatattacaaatgtcaggattctcattccttggattaggtgttaaggcacctacagccgaatgggggatgatgcttaatgaagcacgaaaagtaatgttcacacatcctggaatgatgatgacaacaggtgtggctatcgtcataattgtgatggcgtttaactttttatcagatgctttacaaatggcgattgatcctcgtatgtccgctaaagaaaaacgactggcactgaagaaaggtgtgaaagcacgtgacactgcttaa

SEQ ID NO: 6981 - DNA, 936 bp, Staphylococcus epidermidis
atggttaaatttattatgaaacgtcttacgctcatgattccattattgattgtagtgacttttatgactttcatgatgacctatctcacgaacgaagatccagccgtaacaattttacatgcccaaggaacacctaatataacgcaagatttaatagctgaaactaaagaaaaatatggattaaatcaaccgatattcacgcaatataaaaattggcttgttgatgccttgcagtttaaatttggaacgagttatatcacaggggatccagtatctgagcgtatgggtccagcgtttatgaatacattaaaactcactttgatttccagtgttgtggtgatgataacgtctgttgtactaggcatagtgagtgctttgactagtggtagatttacagatcgtgctatacgttcaatagcttttctactaacagctctgccctcatattgggtagcttcaatattaattatatatgtatctgtaaaactcaatttattaccaacctcaggactcacaggtccagaaagttatattcttccagtctttgttattacgattacctatgcaggaatttattttagaaatgtccgacgatctatgcttgaacaattaaatgaagattatgttttgtatttaaaagctagtggtgtacctcgtctgacaatgttgttgcatgtattacgtaatgcattacaggtagccatatctattttttgtatgtcgataccaatgatcatgggaggtctagtcgttattgaaaatgtatttgcgtggccaggtttaggaccattaagtattaaagcgattactgaacatgattttccagtaattcaagcatacgtgctcattgtcgcggtgttgtttattctttttaatacacttgcagacatcattaatgcaatattaaatccgcgtttaagggaggcaatgaaatga

SEQ ID NO: 6982 - DNA, 1599 bp, Staphylococcus epidermidis
atgaataaactcacaaaactaagtacagtcatttttgtatctggaattattttagccggttgtggaagtaacaaagaactaacagagaaaaaagagaataaagtattatcatatacaactgtcaaagatattggagatatgaatccccatgtttatggaggttcaatgtccgcagagagtatgatttatgagccgttagttcgcaataccaaggatggtattaagccattattagcgaaaaaatgggacatttcacctgatggtaaaacatatacgtttcatttaagggacgatgtatcttttcatgatggtacgaaatttgatgcagacgcagtgaagaaaaacatcgatgcagtacaacaaaataagaaactacattcatggttaaaactttcaacactgattgatgatgtcaaagttaaggataagtatacggtacaactacatttgaaggaagcttatcaacctgcgttagcagaactagctatgccacgaccatacgtttttgtatcgcctaaagattttaaacacggtacaaccaaagatggtgtgaaatcatttgacggtacaggaccatttaaaatgggtgaacacaaaaaagatatatctgcagaatttaataaaaataatcaatattggggagaaaaggcaaagttaaataaagtagaagcaaaagtcaaacctgctggagaaacagcatttttatcaatgaaaaaaggagaaaccaactttgcttatacagatgatagaggtacagacagcttagataaagatagtttaaaacaattaaaagaaaccggaagctatcaagtaaaacgtagccaagccatgaatacaaaaatgcttgttgttaattctggtaagaaagatagtgcagtcagtgataaagcagtcagacaagcattaggtcacatggtaaatagagataaaatagctcaagatattttaaacaagcaagaaaagccagccacacaactatttgctaaaaatgtgacagatataaactttaatttaccaacaagaacatatgataagaaaaaagcacaagcgttattagataaggccggatgggtgctttcaaaagatcgacaagttcgtcaaaaagagggcaaagatttgaatcttaagttgtattatgataaaggctcttccagtcaaaaagcacaagctgaattcttagaggcagaatttaagaagttaggtgtacaactagatataaacggagaaacgtcagataaagtagctgaacgtcgtagttctggtgattacgatctaatgtttaatcaaacatgggggctattatatgatcctcagagtacattagcagcatttaagacgaaaacgggatatgaaagtgcaacattaggtattaagaataagtcacaactgtacaaagatattgatgaggcgttcaaaattcaagatgcaaaggcacgttcaaaagcgtatcagcaaattttgaaacaagttgacgatgaaggtgtctttattccaattactcacgggagaatgactgttgttgcacctaaagatttacaaaaattatcctttacacaatcacaatatgagcttccatttaatgaaatgcaatataaataa

SEQ ID NO: 6983 - DNA, 1293 bp, Staphylococcus epidermidis
atgtctaaaatattaatggttggtagtggaccggtcgctattcaacttgctcgactatgtaacttacatggggaacatatggttgatatggtgagtcgcgttcatgcatcaaccaaatctaagagagtctttgatgcgtatcatcgtgacggctttttttcagtaatgactcaaaatgatgcacatcagtgtttttcaggtaagtttacggttagacatttttttaaagatgttaaagacattacacaatattatgacgtggtgattttagcatgtactgctgatgcgtatcgaccgatattacagcaattatctaagtccacattaaaacgtattaaacaagttatcttggtctcgccaacattaggatcacatatgcttgttaagcaaatactatcagatgttcattgtgaaggtgaagtgatttcgttttccacttatctaggcgatactcgaatatttgataaagcacaaccgcattgtgtcctaactacacgagttaaatcaaaattattcgtaggttcgactcattctcagtctattacgttgtataagcttaagtctttattcgactatttgaatatagaattaacaacgatggacacaccgctacatgcggagatacataatagttcactttatgtacacccaccattgtttatgaatcaattttcattaaaggcggtatttgaaggaacgaaagtgccagtatacgtatataagctatttccagagggtccaattacaatgaccttaatacatgaaatgcgattaatgtggcaagaaatgatgatgatattaaaaaaattaaaggtaccctcggtcaatctcctgaagtttatggtgaaagaaaattaccctatacgtgatgagaccatgcgcgaagttgatattgaaagctttgaaaatttatcagctattcatcaagagtatctactttatgtgcgatatacagcaattttaatcgatccattttctaatccggacgatcaaggtgcatattttgatttttctgccgtaccatacaaacatgttgatactgatgaacaaggagttatacatataccacgcatgccgagtgaagattattatcgtactttgatgattcaagcaattggaagagcattaaacgttgcaacaccgatgattgacacattgttattacgttatgaaactaccgttaaacaatactgtgatacacatttacatcaacaactatcaaagcaattcgaattacatcattttaaacaggatttagcgttagtgacgaactacttaactttttataaataa

SEQ ID NO: 6984 - DNA, 816 bp, Staphylococcus epidermidis
atgaatgagcatacaaaaatagagaaccaattacaatattatttagaacaatttacgtacttacatcaactcgttttggaagatagtcggcatattgttgatttagaaaatttgattgatgaatacagtcaatggatacttcaacctttggcagagcatcattatttaacatggaatgatttagaaacaaaaataagctttaccaagaagcttcaagaggtatcagcaaagtgtgtgaaacaggtagaagtcattcgagcacaacgtttgttgaatggtagggcctccacgtcaggttatttcgaaaatatagagcattgtattaatgaagaattcggaagatggcaaattggacaaaatgacaagttgttactgattgggtcgggtgcatatcctatgacattaattcaagttgctaaagaaactggcgctgcggtcattggtatagatatagattcggaagcagttgatttagggcaacgtgtcgtcaatgtactagctccaaatgaagatatcgttattagtaatcaaacagttgatcaattagaagacatccaatctgtgactcatattattttcagttcgacgatacctatcaaatatgacattttgaatgaactttacacattgacgaatgatgaagttgttgtagctatgcgatacggtgatgatatgaaagcattgtttaattatccatctcaagcaactgacgaaacacaatggcgatgtgaagaactacaaacacgaccgaagcagatttttgatattgcactttatcgtaaagtgacatcaaaagttggtgttgaacatgtctaa

SEQ ID NO: 6985 - DNA, 840 bp, Staphylococcus epidermidis; identical to SEQ ID NO: 3640

SEQ ID NO: 6986 - DNA, 204 bp, Staphylococcus epidermidis; identical to SEQ ID NO: 3639

SEQ ID NO: 6987 - DNA, 690 bp, Staphylococcus epidermidis
atgatagatattcaaaatgtttccaaaagctataaaaagaagcatattttcgattccctagatatgcaatttcaaaatcataaaattactattttattaggtgaaaatggtgctggaaaatctacattattgcgtttaattgcaggtattgagaatgcagacgaaggacgtattcaatacttcaatcaatatttgtcaagacgtcgaatacgtcatattgtaggctatgtccctcaagacatcgcactattcgagcatatgactgtcatggagaacattgagtttttcaagtcactttgtgaaaatcctatttcagatgaaacacttcattcttatttatcacaattaaactttactgatacaaaagtgaaagtatctaacctttctgggggaaataaacgtaaagtcaatattatgataggtctacttagtcggcctaaaatacttattctagatgagccaacagaaggcattgatttagaatcaagatatgatattcacaacttattacaacaaatgaccaatcaatgtttaatcatcatgacgacacatcatttagacgaagttgaagcactagcagatgatattaaagttataggtcaaaatcctttttatcatgatattttagaaaataaaggttggtcttttaaaaaatatgcaaatgccttagctgataatacgaaatcttaa

SEQ ID NO: 6988 - DNA, 774 bp, Staphylococcus epidermidis
atgagtaaaacagcaattataacaggtgcagcaggtggattaggtaaaggtattgcagaacgtcttgctaacgatgggtttaatatagtactacaagatattaatgaagcacttctattagaaactgagaaagaattcaaagaaaaaggttatcaagttgtcgcattcaagagtgatgtatctaaaaagaaagaacaggaagaattaattcagttcgcagttacagaatttggtcaattagatgtcatggtaaataacgcaggcgttgatgcagtgacgccaattttagaaattggtgaagaggaattatctaagttatttaatattaacgtatttggtacattgtttggaattcaagcagctgctaaccaatttattaaacaaaaaagtaaaggtaaaatcattaacgcatgtagtattgcaggacatgaatcttatgaagtactcggcacttactcagctacaaaacactctgtacgttccttcactcaaacagctgctaaagaattagcagacaaaggcattaccgtaaacgcttattgcccaggagttgccaaaactgaaatgtgggatcgtattgatgaagaaatggtgaaacttgatgatagtctagaaataggagacgcgtttgaagcattttcttcagaaatcaaacttggaagatatcaagagccatcagatgttgcgaacttagtatcattcttagcttcaaatgattctgattatattacaggtcaatccattttaactgatggtggattagtgtacagataa

SEQ ID NO: 6989 - DNA, 1377 bp, Staphylococcus epidermidis
atgagcgaacagtttaataaagggaaacaactaattgtagcgattatcttagggattctcacatactggttatttgcacagtcttttttgaatatcgcaccacatgttcaacgtttttatcatgtagatatgagtattgttaatattgcggtcagtctgacatcactcttaacaggtgtatttatagtcgtagcagggggattatctgataaaataggtcgagttaaaatcacaaatgcaggtctaatattaagtatacttggctctattgcattgattatctcgcatgcaccaattttattattattagggcgtgttttacagggcttatctgctgcatgcttacttccagcaactatcgcgttaattaattctttcttccaaggtgaagaaagacaaaaggtgcttagttattggtcattcggatcctatggtggaacagggttagcatccctatttgctggaattatagctacatttattggatggcgatggattttcgtgttgtcaatcatcttttcaattatcgccttaatattgcttagaggtataccagaatctaaagatgagtctgcatataataaaaaatttgatatcattggaatcattatttttgttgtcatgatgttaagcattaacatagtgattacgcaaggcgatagaattggatggttaaatcctcttatattgatattaattgctatattcattgtgacattaattgcattttatatatttgaaaaacgtcaagatgaaccatttatagatttaagtttattttcaaataatgtttatatcggaacaacattagccaacttgatggtgaacatggatattggttcattagcattatttaatatttatgttcaagacgataaacatctatcagctgcacaagccggtttaattacgattccatatatgctgtgtagtttgttaatgattcgtgttggtgaacgttttatgcaaaaaagaggaccgcaattgccattgatgttaggtccggtatcgattactgttggtattatacttttagcattcacttctttgcctaatatgatttattatattgtggcatgtattggctttatctttataggtctaggattaggattttttgctacacccgcgctatctacagctgtatctaatgttccagctgaaaaagcaggtactgcatcaggaattatcaaaatgacttctacactaggtgcagcatttggaatcgctgttgtgacaacaatatatacggcattatctgtaaatcacccggcatatttagcagctactatcgcatttatcgtgggtgcaggtttagtgtttatcgcatttattgcggcgtattgtttaattcctaaaaagaatgtagatatttaa

SEQ ID NO: 6990 - DNA, 3018 bp, Staphylococcus epidermidis
atgagtaaggaaatattcgatacttttaaatttaaatgtggtgccgaattaaaaaatagagtattaatggcacccatgactatccaagctgggtattttgatggaagtgttacatcagaaatgattgattattatcaatttagagctggtgatgcttcagcaatcattgttgaaagttgttttgttgaaaatcacggacgaggatttccgggagctataggtattgataatgatgacaaaatacctggactcaaacgtttagcagaagcgattcaagctaagggatcaaaagcgattttgcaactttatcatgccggaagaatggcaaatcctaaatttaatgaaggagagcagccgatatctgcaagccccattgcagcattaagacctgatgctgtaccacctagagaaatgacacatgctcaaatcaatcagatgattgatgactttggagaggctacacgtcgcgctatagaagcggggtttgatggtgtcgaaattcatggtgccaacacatacttattacaacaatttttctctccacattctaatcggagacaagattcatggggaggcagtcgtgaaaaacgtacacgatttccaatcgaagttttaacaaaggttcaacacgtcgttgctgaaaaagaggcttctcattttattataggatatcgattctcacctgaagaaattgaagaaccaggcatacgttttgaagatactatgtttttactaaatacattagcagaatatgaacctgattacttccatatatcagcaaacagttatcaacgtacatctattgtgaatcaagaagatacagaacctttaattaataagtacatcaaaatgcaaagtgcacagttggcaaaaattccattaattggtgtaggtagtattgcccaacgacaagatgcagaacatgcccttgaactaggatatgatcttttaagtgttgggaaagcctatttagtggaaccacaatggacagataaaatttcacaaaacgaagaagtagaacaatttgtcgatatacatgatcagaaagtacttcacataccatcccctttatggaaagtaatggactttatgattttagataaagaagaagagcatcgtaaatatgaaaaattaaaagcacttcaaaataaaaaagttaaatttaacaaaggtacgtatcatgtctatgcaaaaggtcataatggcaacttacctatgaaagtccaattatcagaagataagattgtaagtatcgaggtagatgatagcggagagtctgaaggcatagcgaacccagtgtttgaacgtttacctcaagatattatcaatgggcaaacactgaatgtagatgtcatttcaggtgcgacagtaacaagtgaaggcatcgtgcaaggtattgcagatgcaattgaacaagcaggagaagacccagatattttacgggcgcgtcctaaaccagtcgttcagtggtctgatgaggtcgttgaagagacgactgacgtcgttgtgatcggtacaggaggtgccggactcagtgcagctgctacggtattagatgaaggaaaagaagtcatcatgcttgagaaatttgcggctataggtggcaatactatccgtacaggtggtcaagtcaacgctgctgagcctaaatggcaaaatgcattcccggcacttgctggtgaaaaagagacactcatacagttattaaatcatgatgaaaatgatatagatgaagcttacattgaagatttcaatactttaaaacgtcaaattaaagactatcttgaaaatagcagtaatgaagatgaatatctttttgattctgtcgaattacatcgtattcaaacatatttaggtggtaaacgtaaagatcgtaataatgtcgaaatatcaggtgattatgatttagttaaaacactcacagataacgttttggaatctgtatactggttgaaagacaaaggtgtacattttgatcgttcgtttgtagatatgcctgtgggtgctttatggcgtcgaggtcataaaccaatgaaagcacaaggtttagagtacattgaaaatttaggagactacgttaaacataatcatggtcgtatttttacagaaactactgcagaaaagttaatcaaagaaggtaatcaagttgttggtattgaagcacgtaaagcaaatggtgctaaagtgaagattcatacacgtcatggtgtagtgttggctactggtggctttggagcgaatacaaaaatgctacaacaatataatacgtattgggataatattcctgatgacattaagacaacgaattctcctgcaattacaggtgatggtatccgtttaggtgtgcaggcaggcgctgacatcgtaggtatgggattctctcaaatgatgccgatttctgatccgaagacaggtgcattatttactggattaatcgtaacaccttcaaactttgtcttcgttaataaggaaggacaacgttttgttaacgaatttgaaagtagagatgtattatctaaggcagcattagaacaaaaagacggtatcttctatattattgcagatgcaaatattaaagcactagctatgaatacaactgaggacaaaattaatcaagaattagaagacggcactttagtaaaagcagataccttagaagcattagcccaaaaattaaacattgatacaactacttttgtgaacacgattgaaagatataataccttcgtagaacaaggacaagatgaggatttcaataaaaatgcatttgatttaaaaattgaaaaagcaccattctacgcgacaccacgtaaacctgcaatacatcatactatgggtggtttaaaaataaacacgcatgcacaagttatagatgttgaaggtcatatcattgaaggtttatatgcggctggtgaagttgccggtggtattcatgctggtaaccgtttaggcggaaatgcactggcagatatttttacttttggtcgcattgcaggtcaaagtgctgtaacgaaataa

SEQ ID NO: 6991 - DNA, 906 bp, Staphylococcus epidermidis
atgattaaagcaatggggacggtgatacgtttatcgattgagcatcaacatccggatacattacttcaagaagctgaaataaaaattcgtgcttgggaatcacaatttagtgctaatgatccgaaatcagatttgatgaatgtgaatcagcatgcaggtatcgcaccagtcaaggttagttctgagatgtttaacatgatacgttttggttatgaaactacattatcttctaattttaagatgaacattttgatagggccactagtcaaattatggaaaattggttttaaagatgcattgaaacctaaagaagaggatatacaacgtactttattgtgtatggatcctgaaaatcttgttctaaattcaaaaacacatgaagtatttcttacacaatcaggaatggagattgatttaggagctatagttaaaggctattttgctgatcaattacaacaatactttttagctcatggtgtatcttctgccattatcgatttaggtggtaatgttttaacaatcggtagacaacccgaaacattagaaaaatggcatgtaggtgtacgtaatccatttcataagtatgcactaccactcgttacattaagcgtagagcatcaatcagttgtcacatcaggtatctacgaacgctacttcatacaggaaaatcaattatttcatcatatattggattcaacaacaggttatcctgtagataatgatatcgctagcgtgacaatcatatctgatcatggcattgatggcgaggtatggagtacaatttgtagttttggtcagtcacaaaaaaatattgaattattaaatctcattgacggtattgaaggcattattgtgacaagagatggaagtgttttaatgacttcgaaaatgcaaaagtatttataa

SEQ ID NO: 6992 - DNA, 996 bp, Staphylococcus epidermidis
atgtataaaaaaggtttaattttattttttgtagcagtactaacattggcacttactgcttgcggtaaagatagtcataatcagtcatctgatcataaaggaaaattagatgtgaagacaacagtctatccacttaaatcatttgcacagcaaattggtggtaaatatgtaaatgttgaatcggtttaccctaaaggcgtagatccacatacatatgatccaagtcaaaaacaaatggtagatattgggaaatcagacttattcttatatactggtgataacttagatcccgtagctaagaaaatcgctaaagctataaatgataaagataaaacactatcactagaatcgactttagataaaaataaagatttattaaaaggcgaagaacatgaacatgagcacggagaaggtcatgaacatggtgaatcacatgaagatgaacacgaacatgaacatcatcaccatggaaaatacgacccacacatttggttggatcctgtagtaagtcaaaaatttgctaaagcgattaaagatgaattgattgagaaagatagcaaacataaatcttattatgaaaagaattacaaccaactagttaaagagttaaaaggcttagataaagatatgaaacatgctgtgaaaggtaatgaagataaaactgtttatatttcacacgactctataggttatctagctgaacgctatcattttgaacaagaaggcattgaaaatatgaatgcggaagaaccaagccaaaaagatttaacaaatattgttaaacaaattaaagaagataaagtgaaaaatattttaatagaagaaaatgtatctcataaagtagcagatacggtaagaaaagagacaaatgctaaaacaattaaattttacaatatgggatcacacacaaaacaacaagatgatgacaaaaacacttaccaatcatttatgaaagaaaatattaaagctattgaaaaagccctacaaaatgaataa

SEQ ID NO: 6993 - DNA, 1107 bp, Staphylococcus epidermidis
atgtctcatcatcgcgtcattatcatcggcgcaggcgcagctggtgtgggtatggcaatcactttacaagaattctgtattaaagatgttctaattgtagaaaagggatccatcggcaattcatttaaacattggcctatctcaaccaagaccatcacaccatcatttacaactaatggttttggcatgccagatatgaatgctatagctaaagatacttcacctgccttcactttcaatgaagaacatttgtctggaaataattacgctcaatacatttcattagtagctgatcattacaatctaaacgtcaaaacaaataccaatgtttcacgtgtaacatacatagatggtatatatcatgtatcaacggactatggcgtgtatacagcagattatatatttatagcaaccggagactattcattcccgcatcatcccttttcatatggacgtcattatagtgagattcgagcgttcactcaattaaacggtgacgcctttacaattattggaggtaatgagagtgcttttgatgcagccatacaccttagtcaaacaggtgcaaaaatatcaatatacacatctaaaactggacttaataaggaagatgcagacccaagtataagattatcaccgtatactcaacagcgattgcgtaacgctatacaagatggtgcattaatcgaaatgcatgttggctaccaggcacgcaaaataacatatcaaaaccattcctataagatacattttgataatggacatattgttcactctcatactgaaccgattatcgcaactggatttgatgttacccaaaaccctttaatagaacaactatttcaagtacgacaatcagaagttcaattaacagaattagacgaatctacaaagtttcctaatgtatttttaattggagcgactgtacgtcatcaaaatgccattctttgttatatatataaattcagagcacgttttgcagtattagcacgcatagtaagcctacgcgaaggcttacctgaagatacgtctttaattcagtcatatcgtcaaaaaaatatgtttctagacgattatagttgttgtgatgtgaattgcacatgttaa

SEQ ID NO: 6994 - DNA, 1383 bp, Staphylococcus epidermidis
atgttaaaagtaacctttaatttacgtgatgggacgtttactgacattccagatgatgcacatgagttgatcattgaaggttatgacaaattaacctctagccaacaagttttgttaaaacgttacattatcaaacaccaattagatatttcattacaacatgctattctttcatctccactccatagtttaaatatgattaaaaagttagagacttttgttaaggagagcaaagcataccatcctcaatttcacaatattatttgtggatggtgctttattgtacttatgtttgctttacccatctacttgtcttatcacgtttcagacggattacaatactacgtgtcacactggttaactaaactatcccaaatatcattatttcaagaaaataagctacaacatattttattcggtcactatggtgtcatttctttaggtacatattcattcgtctgggcgttaccagttgttttcatgattagtttatctacagctcttatagataaaactcatttaaagcattatatcgtttggtctatcgaacctacgatgatgagacttggtcttcatggatcagatatcatacccttgttagaaggatttggatgtaatgctgctgctattactcaagctacacatcaatgtcatcgttgtacaaaagtacaatgtatgagcttggtaagtttcggaactgcatgtagttatcaaattggtgctacattatcgatattcaacgcaagccaccgctcttggttgtttttaccatacataggcatggttttcttaggaggaatcatacataacaaactatggtatagtcatcaaacacctatgacaacaccatcagttttccaacgacaacctgtacgttggcccaaaccaaagctactcttaaaagcagcgtggaaaagtattcaaatgtttattgtacaagccttacctatttttataggaatttgccttattgtaagtctattgtctcttacgtctattttgacttttatatcaaatgcattcatacctttattatggctactagatgtacctacacaacttgcaccaggtattctgttttcaatgatacgtaaggatgggatgttgttgtttaatatggatggcggtactttaattcaaagactttccgcattccaattattgttgctagtcttttttagttcaacatttacagcatgttcagtaacaatgactatgctcatgcgtcgactcggttcaattctaggaattaaaatgataatgaaacaaatggtatcgtccacaatttgcgtcaccatactagtcatagcaatgttaagcataactaaaatttcagacttaggagtgatgttatggaaatcattattatcggtggttttttag

SEQ ID NO: 6995 - DNA, 882 bp, Staphylococcus epidermidis
atggaaatcattattatcggtggttttttaggaagtggcaagacctcaacaataaatcatttaatcgctgatgcacttgaaaacaacttaaatcctgctgttattatgaatgaatttggaaaaagaagtgttgatggccaacttatagaacgtcctgaagtacctatgagtgaaatcactgaaggatgcatttgttgtgcgatgaaatcagacgtatcacaacaactacatgaactatacttaaaatatcaaccagatatcatctttattgaatgcagtggtatagctgaaccactagctgtcgtcgatgcatgcttcacacccgtacttgcaccttttatcactttaaggagtatggtgggaattattgatgcaagcatgtattcacgaattaaatcttatccacaagacattgcagctctattttatgaacaacttcgtcattgttcgactttatttgttaataaaatagataagatagaggtggaagaaaccgcccgcttgctacgtcaactcgagcacctcaatagcgatgccaatattcaagttggtcaatttggagaattaaatttaaaatcactactagagctaacacatataaattcaaatgcatgtagcactttgcataataatataaatcatcaattcatcgagaatcctaggatacaaacaaaagaagaaatgatcaacgcgttagataacttgtctcaagatgtttaccgtgtcaaagggtttgttcgtttttcagatcagcaacacgtttatttagtacagtatgcacaaggaaatatagaattatctcccattcaacttaaaaacgatgtaccattgtacctcattgttataggaaaacatttaaaacaaatacaacttgatttataa

SEQ ID NO: 6996 - DNA, 717 bp, Staphylococcus epidermidis; identical to SEQ ID NO: 3629

SEQ ID NO: 6997 - DNA, 1884 bp, Staphylococcus epidermidis
gtgggagtcgtgtcaatcattactgggattacaatatttgtcagtggtcagcatgctcaagctgctgaaatgacacaatcatcatcagattctaaagaacagtcacaacaaacagaacaagttgaacaaaaagaagatacaactcatttatcttacgaattgaatcaagagggtgagacagctagccaatcaaagactagtcaagagaatcaatctgatggcaatgtacaaaaaaagggtaatcaaacacaacaagattcaacacaaacgtcaccactaaatgaccaagaacaaactttaaaggggcaacaatcaaaagataatcatgttaccccaaattcacgtcaggatacatatccaaaaggccaaaatcaagatgataaaggcaaacaacagtttaaagataatcaacactcacaaacagaacatcaacctaatactcaaaaacaaaataatgatcaagattcatcagataaaaagcaacacccatctgatcaaactcaagacttatcttcaaaaggaacacaacctaaacaatcacagtctatagaagatagagataaaacagtaaaacaaccatcttctaaagtacacaaaataggtaacacaaaaactgataaaacagttaaaacaaatcaaaaaaagcaaacatcattaacttcaccacgcgttgtgaaatcaaaacaaactaaacatatcaatcaacttactgcgcaagctcaatatagaaatcaatatccagtcgtgtttgtacatggatttgtaggtttagtcggtgaagatgcattcagcatgtacccaaattattggggtggtactaaatataacgtgaaaaaagaacttacaaaattaggttaccgagttcacgaagccaatgtaggggcatttagcagcaattatgaccgtgctgttgaactgtattattatattaaaggtggaagagtagattatggtgcagcacatgctgcaaaatatggtcacaagcgttatggcagaacatatgaaggcatcatgcctgattgggaaccaggtaaaaagattcatcttgttggacatagtatgggtggccaaacgatacgcttgatggaacattttttaagaaatggaaatcaagaagaaatagactatcaacgtcaatatggtggtacggtatctgatttgtttaaaggtggacaagataacatggtgtctacgattactacattaggaacacctcataatggcacacctgctgcagataaactagggtcgactaaatttatcaaagatacaattaatagaattggaaaaattggtggaactaaagcgctcgatttagaactaggtttttctcaatggggcttcaaacagaaacctaatgaatcatatgctgaatatgcaaaacgtatagcgaatagtaaagtttgggagactgaagatcaggctgtaaatgatttaacaactgttggagcagaaaagttaaaccaaatgacgacattgaatcctaatatcgtctatacatcatatacaggtgctgcaacacatactggaccattaggcaatgaagtgccgaatattagacaattcccactattcgatttaacaagtcgtgtgataggtggagatgataataaaaatgtcagagtaaatgatggcatagtacctgtgtcttcttcactacatccaagtgatgaagcatttaagaaggtaggtatgatgaacctagcaactgacaagggtatttggcaagtgagacccgtacaatatgattgggatcatctagatttagtcggcttagatactactgattataagcgaactggagaagaattaggtcaattctatatgagtatgataaataatatgttgaaagtcgaagagttagatggtactacacgtaagtag

SEQ ID NO: 6998 - DNA, 1188 bp, Staphylococcus epidermidis; identical to SEQ ID NO: 3627

SEQ ID NO: 6999 - DNA, 318 bp, Staphylococcus epidermidis; identical to SEQ ID NO: 3626

SEQ ID NO: 7000 - DNA, 687 bp, Staphylococcus epidermidis; identical to SEQ ID NO: 3625

SEQ ID NO: 7001 - DNA, 1134 bp, Staphylococcus epidermidis
atggacattaaagcacagttaaaacagatacaaaataaaggtttatatagagagcttcaaccgattcagtccgtagaaaaacaatatatttatatcaatgaccaatcttatattaattttacttcgaacgattatctcggtataggacaagttgaatatcaacctcaaaatttcttagattttataaagacatatagtatccatctatcaagttctagattagtgagtggcaattcagttgtttatcagcaattagaacaggcaattagcgagcattttaattttgaagacgccttaatttttaatagtggttacgatgcgaatttggcggtatttaatatttttaaaaataataatgtagttatcttttcggatcaacagaatcacgccagtataatagacggtattaaattaagtggtttatcaaaagtgatttatcaacatttaaactatgatgacctggaaagtcatttagcacggcacacccatccagatgttcaaaaagtaattgtctctgatagtgtgttttctactaatggcactaaagcagatattaataggctagttcatctcaagcaacgttacaatgcgattttaattattgacgcatctcatagtttaggattaaatctctttgagtgtcatgcagacattgacatagttacctcaagtttatctaaagcgtggggagcccatggtggcttgatactaagttcaaaagatataaaagatttaattattaataaaggtcgttcgcttatctactcgagtagtttacctagctatcatttgtattttattcaagtgagcttacaacatgtgattgaagatacatacagacgagagaagttgaatgcacttagtgaatattttaaccaccaatttatggaattatttcccaatcaaccattatctaatacacctatcaaaaatatcgtttgtgatagtttggcttcagcacaagcacaatacgacatgttatttgaacatggtatatttgtcagttatttaaggtatccaacagtgtcacagccaacattaagaatttcattatcctattttcatgacacagatgatattgatcgacttttcaatgtaatgaaacaatacgatgaaggtgatagctatgtatag

SEQ ID NO: 7002 - DNA, 1356 bp, Staphylococcus epidermidis
atggctaatacacgagagttaaatcataaagatgcacagtatgtatggcacccattcacacagatgggagtctatgcaaaaaatgacaatattattattgaaaaaggtcgcggaagttatttatacgatactgaaggcaataaatatttagatggttatgcgtcattatgggtcaatgtgcacgggcatcagtataaaaagttaaataaagctattcataaacaacttgataagattgcccattctacgctattaggttcgtctaatattccatcgattgagctagccgaacagttagtcaaattaacaccagatagattacaaaaagtgttttactccgatacagggagtgcgtcggtagagattgctattaagatggcttatcaatattggaagaatatcgatgctgaacgatatgcgaagaagaataaatttcttacattacatcatggatatcatggagatacaataggttctgttagcgttggtggtatcgatagtttccacaaaatttttaaagaccttatttttgaaaatatacagatagaaacaccgtgtttatataaaagtaagtatcgcaatgaagcggaaatgcttaattcaatactgaatcaaattgaagatatattatctgagagaaatgatgaaatagtaggatttattctagagccacttatacaaggtgcaacaggtttattcgttcatccgcatggttttttgaaagctgtagaacagttatgtagaaaatatgatgtgttactaatttgtgatgaagtagctgttggtttcgggcgtacgggagaaatgtttgcctgtaaccatgaagatgtacaaccagatattatgtgtctgggtaaggcaattacaggcggttatttaccgttagcggcaactttaacatctcaaaagatatatgatgcttttttaagtcagagtcacggtaagaatacgtttttccacggtcatacatatacaggtaatcagttagtttgttccgtagcacttgagaatattaatctttttaaaaagaagcatctgattgggcacattcaaaagacgtctcaaacattaaaacaacgtttagaggcacttcaacctcataaaaatattggagatattagagggcggggattaatgtatggtgtggaattagttgaaaacaaatcaacgcagacaccactcgatattccaactgtagaactgattatacgtcgatgtaaagagaatggattgatgattcgtaatttggaaaatgtcatcactttcgtacctattttaagtatgtctaataaagaaattaaaaaaatggttaaaattttcaacaaagccttacatcaaacattgggtaagaagtaa

SEQ ID NO: 7003 - DNA, 672 bp, Staphylococcus epidermidis
atgaacatatttataactggaacgaatactgacatcggtaaaacgtatgttactaaatatctctataaggcattaaaaacgaggggatatcgggtatgtattttcaaaccttttcaaactgaagaaatcggtggaggtagatacccagatttagagatttataaaaacgaatgcgatttagactatgacgtcacgtcactttacacattcaaagacccagtttcaccacacttagcattcaaaattgaaaggcatcagcaattgaaccatcaaacaatgatagacaaactcgaatcactaaaagcacaattcgatatgattctcattgaaggtgcgggcggtattgcagtgcctatctatgaatacagtgaccatttttatatgacaacagatttaattaaagacacatcggatttcattgtgagtgtcttaccttcaaagttaggtgcgattaatgatgccatcgttcaccagaaatatattgatcatcaagaacttcccccgaatgtgttaatcatgaataactatactgatagtgctattgaacaggataatttacataccattgaaaaattaacacataagcctgtttatacgttgggtcatcaagcgactcaagaaagcttttccgaagcatttatacaacgaattataggaggatccaatggctaa

SEQ ID NO: 7004 - DNA, 135 bp, Staphylococcus epidermidis
ttgtcaattttgtcatttccggatggatataatttaagtggtagttctacccctcctaatgtccaacaagaagttgcaggtgcagaatcattatacggtaatccaagagcatttattcttaagcataataagtaa

SEQ ID NO: 7005 - DNA, 3120 bp, Staphylococcus epidermidis
atgaggaataaaaaaatatggatatttaatgctactaatgactttgtaggtaatcctaaatggttgttcatatatgtgaataaatatagaaaagatatcgatgcatattggatgtgtgataatgttcatgtggtaaattacgttaaaagtttaggattcaatgctgaattatttcattccaaaaaagcagaaaagattaaaagcgtggcaggtgtatttgtcgtacatcaagtgaaagaacatatccctgtaaaatttgaaaatgaagtcgtcatactaaatctatggcatggggtcggtatcaaacctatagagcgatttgttgactcgccaggaattagatatcgtacatataaaaaatatatcaagtataatgagatgtaccataataaccaattatttttggtcacttcaccgcttatggaacaacattttactaaaatgcttaatttagatgaagatcaaatcatccgagcaggttatccagcaaatatgtttaataaagctgaatttagatcttttgatcattctattaagcggcataaaggtttaaatgctgaaactaaagtagtcttatatgctcctactttcagagattataaaatgaataatttttttggtgaagctatacctgatatggcaaagcttcttaaaactttaaagaaaaataatattttgctaattataaaattacattacttagttaaaaatgatgtgaatttcacaactgtcaaaaaaatgtatgagaaccatccaaatattttgttttgggataataagaaagacatttatgaaatattcgaccaaatagatttaggaatcttagattattcatctatttattacgatatgttagcttcaggagttaaaaagtttattagatatatttatgattatgataaatatatggaaaacagaactttagtatatgattacaaagaaaaaacttcaggtgtgattgtttcaagttttgatgaattattaaaagctctagatcaaattgacgctatagaaattaatgaaaagaaaagtaaggaaattataaatgaattttggcaatatgatcaggacgataaaaatggttttgagaaaattatagatacaactttaaaatttggtattaaaaagaaacaattacctaagttatatagctttgatatatttgatacgttgatacaaagaaaaacattaagaccagatggtattttctattatgttaaagataagttattaagaatgagtactgatataccgatatatgtaatacaaaattatccacgtattagaatccaagcagaaaactatgttagagattattatcaaaagtctgaatttattcgtgatgaaaaaagaatcgaaataagatttatagatatcattaacagaattaaaaatattcacgagctcacagatgatcaggcgcaatttctatataatttagaaattgaagcagaaatagcaaatgtagaagaaaaaaaggataaaattaaagttcttcataaattattagacagttatcaagacgtcattctaataagtgatatgtatttgcctaaagaagttatcttagaaatgttatatcaagtagaccctagattaactgaattacctctttatctatcaagtgatataggtaatcaaaaatcaaccagtacactatatttagatgtgtttgaagatttaaagtacaattattcagaatggattcattatggggataataagcatgcagattttaatgttcctaaaaagttaaatatcaaacctattcatcatacaataactaaatttaatggatatgaaaataaaattttaaataggaataagaactatgatacattcttacttacaacacaaatagcaagatttcgtgaaaatgataaaagtagattaaattactatgtatacagttatataagtagttatttcataccatatgtgagttggtctattaaaaaagcaattaaagaaaatattaagacgctttattttatatcaagagacggtgagttacttaaaaaaattgctgatgaaataatatcagtgaaaggatacaatatcaaaactaagtatatatatgggtctcgaaaagcctggaggattccttcgtttattaatgaagtggacaaagagttcttttcgccttttggtaactttacagggttaacgaactttgatagtaccttacgtgcgttgcatatcagtgaacaagaatttgatgagatatttccacagttaaaacatattaaaggatgttctgaattcacaaaaagtacaaaagaattaattagagtttctgctcaaaataataataaatacaaaaagttattactaaaaaaagcccatgaagaacgtaaaattgtgaatgattatttaattcaagaaattgatttcaatgaaaaatttgctttcgtcgaatattggggaagaggttacacgcaagattgcttagatcgactcttaaataacattagcaatcaaacgattaatacgatattcttctatgcaagaagtatttatccgacagtaggaacatcaatcagatataactatactagtaaaatgacatcattaatatttattgaatctatatttgccaatatgccatatcaaagcattccaggatatcgtagaaataacaatgtagttgaaccagtgataaattttaaaaattataataaacaattatatgacgcaatggacaagatattgccactattcatacaagaattttttaataacaaatatatagatgaagatgaagttgaacgtaatttctatgattttggtgttgagtattttaaaaataatcctgaagatgactttatcgttgaattctttgcaccactcaaagattcagtcatattgtacgaaccagagatagaatatgcacctgccattagctataaaatggcttctcaaaagttattaggaaaaaaagtcccgttaaaaactaaaaataaaagaatgtcattaaaaagatcgccattaggagttcaaaaagcatatcaatttcatattaaatatttaaaaaacagaaaatcaaaaattatacgacaatttctgaataatagagtgattaaggttattatgaagttaaaaactattttaaaacaatga

SEQ ID NO: 7006 - DNA, 495 bp, Staphylococcus epidermidis
atgattttaactatcttatttatctttttctgtattcgactaatcagcttaaagatatcaatgcaacatgcaaaacagctaaaggtagatggcgccgtagaatatggtattaaaaattcaaaatttctagccattactcacgtgttgatttacatgagtgcagctatagaagcattcattcgtaaggatacatttagtctacttaacggcattggcttaatcatattgatcatcgcttatatcatgctatttatagttattaagacattaggtcgtatttggacattaaaattatttatactgcccaatcaccctattattaagtcagggttatataaagtaacgaaacatccaaactattttttaaatatcattcccgaattaattggtgtattgctactaacacatgctacatacacaacactcttattagttccatatgcttattttttaattgtacgtattcgtcaagaagagaaattaatgaatatataa

SEQ ID NO: 7007 - DNA, 129 bp, Staphylococcus epidermidis
atgtttaaaggtataagaccgttgttatgtcgaaatatgtttgattattcttcttgtaagtattatgtcggtgttgtagagggtgaaatttattatttcaacgaacaaaatattgaaaagttattttga

SEQ ID NO: 7008 - DNA, 1485 bp, Staphylococcus epidermidis
atgagtgaagcaaatcataaaaacatcgttgttgtaggtgcaggaattattggtacgtcagtagcgacaatgctttcaaaagtaagtcctaactggcatatcgatatgtttgaaagactagaaggcgctggtattgaaagttcaaatgaaaataataatgctgggacaggccatgcggcattatgtgaattaaactatacagttgaacaagatgatggttcaattgatgcatctaaagcgcaagaaattaatgaacaattcgaattatctagacaattctggggtaatttagttaaaaatggtgatatttctaatcctgaagaatttatccaaccattacctcatatcagtttcgttatgggaccaacaaacgttaactttttaagaaaacgttatgaaacactaagaactcttccaatgttcgatacaatcgaatatacagaagacatggaaacaatgagaaaatggatgccattaatgatggaaaatcgtgaaccaggtcatcaaatggcagcaagtaaaattgatgaaggtacagatgtgaactatggtgcgttaacgcgtaagttagcacattacttagaacaaaaatctaatgtttcattaaaatacaatcatgatgttgtagatttaacacaaagagaagatggcaaatgggaagttgtcgttgaaaatagagaaactaaagaaaagataactaaaatagcagataaagtgtttattggtgctggcggtcactctattccgttattacaaaaatctggcgttaaacaaagagaacacctaggtggtttcccaatcagtggtcaattcttaagatgtacaaacccagatattattaaacaacatgcggctaaagtttacagtaaagagcctcaaggtaagccaccaatgactgtaccacaccttgatacacgttatatcaatggtaaacaaacattattatttggtccatatgcgaatatcggccctaaattcttgaaattcggttcaaatttagacttattcgaatcaatcaaaccatataacattactacaatgttggcttcagcagttaaaaatgtacctttaattaaatattcaattgatcaaatgatcaaaactaaagaaggttgtatgaactatttaagaacatttattcctgatgctaaagatgaagattgggaactttacactgctggtaaacgtgttcaagttattaaagatagtgaacaacacggtaaaggtttcgtagtatttggtactgaagttgtcaattcagacgacaattctatgattgcattattaggtgaatctccaggggcttcaacatcattatcagttgtattagaagttttagagaaaaactttgctgatgacaaagaagcatgggaacctgttgttaaagaaatggtaccaacatacggtcgttcattaattaatgacgaaaaattaatgagagagacacgccgtgaaacttctaaaaacttacatttaaacagataa

SEQ ID NO: 7009 - DNA, 981 bp, Staphylococcus epidermidis
atgaaagaaaatttttggagtacattgccacgtccattttttattttggcacctatggaagacgtgacagatattgtctttcggcatgttgtcagtgaagctgcgagaccagatgtattttttactgaatttaccaatactgagagttactgtcaccctgaaggtattcatagtgtgcgcggacgcttaacttttagtgacgacgaacaaccaatggtagcgcatatctggggcgataaaccagaacaattccgagaaatgagtatcggcttagcggatatgggctttaaaggtatagatttaaatatgggttgccctgtcgcaaacgttgcgaaaaaaggtaaaggatccggcttaattctacgacctgaaacggcagccgaaatcattcaagcttctaaagcaggtggtctaccggtcagtgtaaaaacacgtttaggttattacgatatcgatgaatggcgagactggttaaaacacgtcttcgaacaagatatcgcaaatttatccattcatctacgtacccgtaaagagatgagtaaagtagatgcacactgggaattaatcgaagcaatcaagacattacgggatgaacttgcgccaaatacactattaactatcaatggtgatatccccgatagacaaactggtctagaactcgcaaataaatatggtattgatggcattatgattggtagaggtatattccataacccattcgcatttgaaaaggaaccacgcgaacattcaagcaaagaattattaggtttattacgcttacatctctctttatttgaaaaatatgataaagatgaagcccgacagttcaaaagtttacgcagattcttcaaaatctacgtacgcggcattagaggcgctagcgaactccgccatcaattaatgaacacccaatccattgccgaagcaagagaactactcgatacttttgaagcacgtatggatgcacgctcagaagtataa

SEQ ID NO: 7010 - DNA, 360 bp, Staphylococcus epidermidis
atgaaaaaattgatttttatagttgctattctctttatccaagcctgtagttatgttgttattaactttttcttcttcgacatgtgggcgattcactcaagtgaacaacaattaaatcaatccatacaacatcatgacacaaagcaacttcataagattgctaaagataagcagacatatcagtttttaaaaactataaagaaagccgatttcgaaaatgcgacagataaccaaggtggtgggcctattggttattatcgtttagatattaataaaaaacccgtcggacttacaatcaatattaaatataacttccttccagaaaagacaactattaaatcaataaagttatatcaataa

SEQ ID NO: 7011 - DNA, 312 bp, Staphylococcus epidermidis
atgtcaaaaaagaaaatcttgatctttattagtgtcatattaatcatttttggaggtgtctacctcaaaatgaaatatgacgaaaaagcaaaacaaaaagaaatctactacaaagagcaacaagaacgtatcacgctttatcttaaatacaacaccaaaaaacctaatactatcaaatctgtccatttcacaagtttagaacaggaaccaatgggtgatgctgttattgaaggctatatcaataacaataaagaagatgaatttgttgcatttgcatcatctgaagataattttcaattcaaggtgatatga

SEQ ID NO: 7012 - DNA, 186 bp, Staphylococcus epidermidis
atgaatcattttggtaagcttcatcgtatatcattaatattaaatattatgtttttaatactcatgcctaaaatctatagttttgataatatttatatatcaataatttggactttgttaggaatagcaaatgctgtctacttattgattaagcaaagacaagaaaacaccattaaacgtaaataa

SEQ ID NO: 7013 - DNA, 903 bp, Staphylococcus epidermidis
atgaaaagacactttttagcaatcggagcaattacaataacaacattacttgcgggatgcgattttggagatttggtaggacagcatcagtctggtaagaaatcagaaaatagtaacactcaaaccgaacaagcttcaaataataaaaattcaaattctaataatggtcattcaagtaataacaatgatcctagaggtagagtggaagatttaactcaatcgcagaaggtagcattagctatcaatgatccctcagtttctcaatatgtcgttaatgcaagtgaattaaggaatcattcattttatgcaaattataacggcggaggccaacgtaaaagtattcatacgtataagttggaagcattaccaaaaaaagtagaaggtgcacctaatgatatgacattctatactgcaaaaccatcaaaagggtcatttgttactcttatcggtattggtaatgaaaaggtattaattgcaggcacacaaagttcaggtacatatcaacaatatgctcattcggaagcagcaagagaattagatttacatgaattattagataaatacggtaaaagttcaaattataaaaatctagcaaatcaaattacgtttacacaaggtcaattatcaaatgcaagtgaatatacatcagatgaagggacgtctaataatgatgcatctaatgatgacaaagttactcgtgataatgtaatagataaagttgaagcgtatgaaggtcatcagctagataccgatacgtatacatttaaagaacccgaacagaacgaagacggagattggggattttctattttagataaggaaggcaacctcgaaggttcttatattgtgacatctgatggtgaagttacaaaatacgatgaaaacggagaagaaatagagtaa

SEQ ID NO: 7014 - DNA, 624 bp, Staphylococcus epidermidis
ttgaaaaagtttttaaaaggatttattttattttttctcattgtgatgctaggatttgcagggggattgggatacagtcattataaagattcaaaagcaaacactgatgtagcttcaaaagagactcagacttcaaataaaaatactcacgaagatacaatttcacaagatgaaatgcaaaatcaagttgatagccgaacaaacgaagtatcaaatgagacatcagctaaaacacttagcgaaaaagcaaagcggttaagagaagcttttaacgttaatgatgaggaagctcaaatattagcagatgaaatcgatagagcagatgtaaataaagatggcacgattacaatggatgaaatgacgcctactttagatcgttttgcaaaagaagggaaattccaaccatctgcaggtggcacaactaacgaagcacatcatcctaaatatacagcagaagatgctagaaatatgtcagatgatgaatttctagacgcgtatacagaaggcatgtcagatgatgaagctgcgacaattcacgaaaatgctcaagaatctaacgagtatatgaaatttttaagaagacaagttgaagcacgtgcaaaaggacagggtggtaattattaa

SEQ ID NO: 7015 - DNA, 813 bp, Staphylococcus epidermidis
atgacaaatcgtttaatattattcgactttgatgaaacttactataaacatcgtactaatcaagcagatatatcttatttaaaagaaatggaaggtttattacagaatataactgctaaagacaatgtcattacggcgattttaacaggaagtactatagaaagcgtactacaaaaaatgagtaaagttaatatgtcatataaacctcaacatattttttcagatttaagttctaaaatgttcacatggaataactgcgaatatattgaatctgatgaatataaaaacgaagtgttgatagaaccgttcttattggaagatatattagatatattaaaacacgtttcttctaaacataaagtagagtttataccgcaaagaatttttcgagaaaatgaaacattgtataatttttatttctattcttcgggtgacacgcatttagataaaacaattttagaagacctcagtcaatattctaagacaagggactatacgatgacatttaatcgttgtaatcctttagcaggtgatcctgaaaatgcttatgatattaattttactccaaagaatgcgggtaaattatatgccacaaaatttttgataaataaatatggcgttccaaaagaattgattattggctttggtgatagtggtaatgatgaagcgtttttaagttatttagatcacgcaatgattatgtctaacagtcaagatgaggaaatgaagagtaaatttaaaaatacaaaatatccttattacaaaggtatttatacacatgtacgtgaatttatagaatatgaaaatgtttaa

SEQ ID NO: 7016 - DNA, 888 bp, Staphylococcus epidermidis
atgagtcagtttaaggacacattatataaactatttgagccaatgatgaaaatagagttctatcaaaatctattggttaatcttttaattatacttgcttatatcttgatgggtatgattgtaattgcgatatcaagaaagttagttactaaatttttcaacgttaatgaaaagaaaaagaaccgtcataaaattaaaagaagtgaaacactatccacattgattcaaaatttaataagttatgtcgtatggtttattgtccttacgtcaatactttcacgtttcggtattagtgtatcagcaattttagcaggagctggagttgttggtgttgccgttggtttcggagcacaaacaattgtaaaagacattattactggtttctttatcatatttgaaggacagtttgatgtgagtgattatgttcaaattaatgcatctggggtaacaattgctgaaggtaccgttaaaacaattggtttaagatcaacacgtatacaatcagatactggagaaatttatacattacctaatggtatgattagtgaaatagtcaattattctgctacagatgtttcacctattgtgatgataccgatttctccaaatgagaattataaagtgatagaagagaaattatcaacatttttacctacattaaagaataaatatgacatatttgtatccgaaccagatttacttggtttagacagtgttgatggcaatgaaatggtgattaaacttttagcacatgttaagcccggaatgcattttccaggacaacgtttgcttcgtaaagaggtcatacaatacttcagtgaagaaggcattcatattccaaaaccaacacttgtaaaacttgataaagaattgaataaaaaagaatag

SEQ ID NO: 7017 - DNA, 786 bp, Staphylococcus epidermidis
atgaaacattcaagcaaaataatagtatttgtaagtttcttaattttaacgatttttattggaggatgtggttttataaataaagaagatagtaaagaaacggaaatcaaacaaaactttaataaaatgttaaacgtgtatccaactaaaaatctagaggatttttacgataaagagggctatcgtgatgaagagtttgataaaggagataaaggaacttggatagttcattctaaaatggtcattgaaccaaaaggcaagaatatggaatccagaggaataattctacgtataaatcgtaatactagaacaacaaaaggatactttttaattagtgagataacagaggacaaaaatggctttgcgcataataaagataaaaaatatcctgtcgtaatgaaacataataaaattattccaacgaagccaatacctaatgacaaactaaaaaaagaaattgaaaacttcaaattttttgtacaatatgccaactttaaagatattaatgattataaaaacggggatatttcatacaatcctaatgtacctagttattctgcgaaatatcaactgaataataataactataacgtgaaacaattaagaaaaagatatgatattccaacgaagcaagcacctaaattattgttaaaaggtgatggcgacttaaaaggctcatctgtaggttctaaaaatttagaatttacttttgtagaaaataaagaagaaaatatattttttacagatgcagtacaattcactcctagcgaggatgatgaatcatga

SEQ ID NO: 7018 - DNA, 138 bp, Staphylococcus epidermidis
atgtggttttcaattaacgtctttttgttacaagtcttaaagaatattaaacaagcaaaatcattttccttaactgaaacgaaagaacgacaaattccatactattacattggaatttgtcgctcttttatttattag

SEQ ID NO: 7019 - DNA, 129 bp, Staphylococcus epidermidis
atgggaatcaaagacgtattaaaaaaattaaaacctcaggaacaatcttgttgttcagtagaaattgaagaaaaaaaagagaagaataaaaaagaacagctggataataacaattgttgtaacaattaa

SEQ ID NO: 7020 - DNA, 885 bp, Staphylococcus epidermidis
atgttagattcaattatggaatttataaaaacatttgtgatgttgttttttgaactattcatactatttatcatcgtgagctttattgtaagtatcatccagcagatagtttcagaagaaaaaataaaatactttttaagtaaacctaatcaagctattaattatattttgggaatggcttttggtgcgatgacacccttttgttcttgttctacaattcctatacttgcaggtttattaaattctaaagttccatttggtcctgcaatgagttttttaattgcgtcacctttaatgaatcccttaatgatatttatgttatgggccttattaggttggaaagttgctgttgtttattttattgtactagcaatctttagtatcttaacaggttttgtattttcaaaaatgaatttagccgaaacttataaaggtgtaaatgttaaaggtgatggattttttgctaataaaacggaatctcgttttaaacaagcattaaatgatgcgtgggcatttttatatccaatgcttccttacctatttattggtgtatttattggagcgttcatatatggatttgtacccgaaacatttattactaaatatgcgagtggaggtggcattatatccgtatttattgcttctattataggtattcctatgtatattagacctgaaacaatgttacctatagctgaagcattagcttcaaaaggaatgtcgcttgggacagttgttgctttgatcattggtggtgctggtgtaagtattccagaagtagtattattatctaaattattcaaaaaagagtttgtagtatcgtttgttatcgccattttagttgtagctatttctacaggtttgatggtgaacatcgttatttaa

SEQ ID NO: 7021 - DNA, 321 bp, Staphylococcus epidermidis
atggaagttattaaagcaaagactgatatgagtgaagatcaacaatttgacttttatgaaaatatgtttaatgcgctagctgataaaatcagattaaaaatactaaatcaaattagccaaagcttcaataaatcattatgtgtatgtgatttagaagagttattagatataaaacaatctaaactttcttatcatttaaaaaaattagtagatgcaaatgttcttattgctgaaaagcatggcacatggaattattataaaattaatgagcagcaaatacaggttgttttaaatgaagatacttgttgtaagatactttaa

SEQ ID NO: 7022 - DNA, 195 bp, Staphylococcus epidermidis
ttgcgagtaaaccatgcaagtactttaactgttggttattttgtaagttatttaaatcttgttatgctatcaagagaaatcaatttaaaagaagctacaatatatatggagaaggagttctttaaagggaacattaatcagtatggcgaatcaacaaaaaataactataaacaagcaattcaagaattgaaataa

SEQ ID NO: 7023 - DNA, 348 bp, Staphylococcus epidermidis
atgttaaatattgaaatatacgaagaagctatgtgctgttctactggagtatgtggtccagaaccggatgaaacactaataaaagcgaaccaaatcaatgaatatttaaagcaaaatcaaatagaagttcaacgttataatatgaataacaatccgaatgaattcattaaaaatcaagaagttattcgtttaattcaagaaaaaggtgatgaagttttacccatcacttttatagaaggcaatataactaaaacgggcgcttatattacccaagaagaagccgatgaaattattacagttaatcaaatgagaaatggaggatgctgtggtggaaatggatgctgttaa

SEQ ID NO: 7024 - DNA, 1728 bp, Staphylococcus epidermidis
gtggaaatggatgctgttaaatacttaaataaattgaatttagataacattgagttaacaaaatatttgttttttactggtaaaggtggcgtaggcaaaacaacgatatcaagttttattgctttaaacttagcagagaatggaaagaaagtagctttagtaagtactgatccagctagtaatttacaagatgtatttcaaatggaattatctaataaattaactaaatatcaacctatacctaatctctctatagccaattttgacccgattgttgctgcagacgattataaagcacaatccatagaaccttatgagggtattctaccagaagatgtgctttctgagatgaaagaacagttaagtggttcatgtacagttgaagtagcagcatttaatgaatttacaaattttttatccgataaaactttagagcaggaatttgatttcattatatttgatacagctcctacaggtcacaccttgagaatgcttgaattaccttctgcatggacagattatttaaatacaacgagtaatgacgcttcttgcctagggcaattatcaggattggatgaaaatagagataagtataacttagcattggaaaaattacgcaatccaaaagatacgacaatgatgttaattgcgagacctactcactcttctatatatgaaattcaaagagcgcaacaagaattacaacaactgtcaatttctaaattcaaagtaatcattaacaactatatagaagaaagtcaaggtttaatttcgagtcagatgaaatcggaacaagataaaaacattaatcattttactgaatggttaaataacaatcatgcttattacgttccatataaaaagcagaaagaagaaggtatagaaaatttaactaatctattaaatgatgataacttaattgaaaatgatgactttattgttgaagatcatccgcaattcaataaattaatcgatgaaattgaaaatagtaaagttcaatatttatttacaatgggaaaaggtggcgttggtaaaacgacagtagcaacgcaattagctacagcattatctaataaaggatatcgtgttcttttagcaactactgaccctactaaagaaattaatgttgaaactacaagtaatttaaatactgcttatattgatgaagaacaagcattagaaaagtataaaaaagaagtactagccacagtgaatgatgatacaccacaagacgatattgattatattatggaagatttaaaatcaccttgtacagaagaaatagcatttttcaaagcctttagtgacattatggagaatcaagacgacatggattacgtcattgtagatacagcccctacaggccataccttgctgttacttgattctagtgaaaatcatcatagagaattaaagaaaaaatcaactcaaactaccagtaatgttgaaacattattacctaaaattcaaaataaaaatttaacacagatgataatcgtaacactagcagaaaaaacaccttatttagaatctaaacgtttagtagaagatttaaatagagctaatataggccataattggtgggttgttaatcaatcgttagttacgctaaatcaacgtgatgacctttttagtaacaaaaaagaagatgaatcattttggataaacaagattaaaaatgaaagtcttgataattattttgtcataccttatggggggttatcttaa

SEQ ID NO: 7025 - DNA, 1665 bp, Staphylococcus epidermidis
atgaaaaaaattgtaatcatcggttcagttgctgccggtacaagtgtcgcggctaaagcaagaagaaatagtgaagatgtggaaattatcgtttttgataaagataatgatatttcgtattcagtatgtggtatcccctactatataggcggtaatgtatctgatattgatgaactcacgccaagaaatgctaaatggtttaaagagcgctttaatatagatatttatacaaaatatgaagtgaatcagataaatgatactgatcaaacaataactgttaccaatttagtaaatgatgaaaagatgattcaagaatatgacgaattagtattagcaacaggctcatcgcctaaggaacttcctcaattaaatagcgaagaatataacaatgtatttaaagttaagaatattaatgatgcgaaagcaatttataattatattgagagcaatgatgttcagaatataacaatcattggtggtggatttattggtctagaaatgttagaacaattatctaattacaatacttcaattattcaacgtagtacttttatgcctcatttagactacgatatcagttttatgattcaagaatatattgaagataaagctaacgtatataccaataatgaaatagatattattgattatgatgaaaatcatacaataaatagagtgagcttaaaaactggcgaattaattgatacagatttaatcattattggaattggtgtcataccaaatactaaattagctaaagaaattggtattaatattggaaaatctggagcaatacaaaccaataagtattttgaaacaaatattcctcacatatatgcaattggtgatgtagcagaaagttataatttaattactggtgaccctatatatagaccgctaggttctacagcaaataaaatgggacgtattttaggagatcgattaactggtggaaatctagaacataaaggcattttaggaacaggcattgttcgtatatttgatatgacaattgcccaaacaggcttaactgaaaaagaagctattgatttagatattgatattgacgtattacacaatgtgaaaccgaatcgtccagaatatatgcaaggccaagaaatggtaattaaagctatatttgataaaaacaattctaaattactgggtgctcaaattattgggtatgaaggtgtagataagagaatagatgtactagctactgctataacgtttggcgcccatgcagaagatttatttcatttagatttagcatatgcgcctcctttttctacaactaaagatcctgttatttatacagggatgattggacacaatattactcgaggacgcaaaattataacgcctgaagaagtcataaaacaaaataatgacttattgattttagatgtacgttctccaaagcaatttgaagttaatcatgttgatggagcgattaacgtcccattgaaaatattgagaagttatgcaaaaacattagataaaaatcaaaagatagtgacttattgtaataaaggtactactgggaatgctgcacaaaacgtacttattaatttaggttttaaacaagtgtttaatttgtcaggtggtaataaaaattatcaacgttataaaaggtttcaagtagaaaggaagaagaaaaattga

SEQ ID NO: 7026 - DNA, 315 bp, Staphylococcus epidermidis
ttgaattataaaaaaatttcacaatacttaaaagtgattgctgatagtagccgccttgaaatattagacttgttatcttgtggtgaattatgcgcttgtgatttattagagcatttttctttttctcaacccacattaagtcatcatatgaaagtattaaaagacaataatttaattacatccagaaaagatggtaataaaattttatacaaattgaatcatgacgtattggatgacgttacatcacgactgactctattgagttccagtgctggcccatgtatatgtgaaacagtagagaaaggtgagtgttaa

SEQ ID NO: 7027 - DNA, 1293 bp, Staphylococcus epidermidis
atgatgacgatattagcaatcacaatatttgtattaacgttaatttttgttatatggcaacctaaaggtctagatattggtattactgcattaattggtgctgtagttgctataatcactggcgttgtaagcttttcagacgtactagaagttactgaaattgtttggaatgcgactttaacttttgttgcagttattcttatttcactcatattagatgaaattggattctttgaatggtctgccatacatatggtaagatcatcaaagggtaatggcttgaaaatgtttatctttatcatgctcttaggttcagttgtagcagctttcttcgcaaatgatggtgcggctttaatactgacgcctattgttttagcaatggtacgtagtttaggatttgataaaaaagcgatattcccatttattattgctagtggttttattgcagatactacgtctcttccattaattgttagtaatttagttaatattgtttctgctgattactttgatattggatttgttgagtacttcagtaaaatgattatacctaatatattctctttaatcgcaagtattcttgtcttatggctttattttagaaagtctatcccaataaaatttgatgcagtaaatattagagaaccaaaagaagcgattaaggacaaaaagctttttaatatctcatggattgtactcactgtattgctagttggttatttaataagtgagtttataaatattccagtatcaattattgctggtatcattgctttaatatttgtattattagcacgtaagtctaaggctgtgcatacgaaacaagtaattaaaggtgcgccatggaatattgttttattctctattggtatgtatcttgtggtatttggtctaaaaaatgtgggcatcacaacgcttcttagtgatgtactaacaaatatttcaaattacggcttatttagtagtatcatgggcatgggctttatagctgcattcctttcatccattatgaacaacatgccaactgttttaatagatgcaatagcgattggtcaatctcaaacaacaagcatactcaaggaaggcatgatttatgcgaatgttatcggatctgatttaggacctaaaataacaccaattggttcgttagcaacacttctctggttacatgtgcttactcaaaaaggtgttaaaatttcttggggacaatactttaaaatcggtattattataacgattccggtattatttatcacactgttagggttatatctaacacttattattttctaa

SEQ ID NO: 7028 - DNA, 396 bp, Staphylococcus epidermidis; identical to SEQ ID NO: 3600

SEQ ID NO: 7029 - DNA, 741 bp, Staphylococcus epidermidis
atgataatcatgttactcattggaatatttggaggatttatttcaggattggttggtatagggggagcaattatcatttatcctatgcttttattattaccacctttggttggtctacccacttatagtgcttatattgcttcaggattaacctcaagtcaggtgtttttcagtacattgagtggatcttttaaagcatataaaaacaaagatttttctagaacgcttgtacttaatatgggaagtggaatgattataggtagtatactaggtgcaatattagcgaatttaataaatgtacagttcgttaatatggtttatattattattgcattattagctcttattttaatgtttattaaagtcgcaccatctactagtcatattaagtttaatcgtctacttttaattacaataggtggtatcatcggtttggtatctggtattgtaggagctggtggagcatttattattattccagtactacttgttatatttaaattaccaatgaacacggtggttacaaatagtattgtaattgcgttcatttcttctattggagcatttattattaaattattacagggttatattcctgttaatagtgcaataccgttaattttaggtagtatactatttacgcctctaggtatgaaaataggacaaaaaatacctgattatattcaaaaaatgattgtaagtattttaatcgtcattgcaatcattaagttgattttttaa

SEQ ID NO: 7030 - DNA, 261 bp, Staphylococcus epidermidis; identical to SEQ ID NO: 3598

SEQ ID NO: 7031 - DNA, 1071 bp, Staphylococcus epidermidis
atgtcacaatataaaacgaaacacattaatgatttcactaaaaaagaattacaagaattgggttctaagggtcaattaattgacgttcgacagcctgaagaatatgaattaggacacattaaaaatgctttattacattcagttgaaaatatagagacttttaaacaaagtaaaaataaaacttactatgtttattgcaaaagtggtaatagaagtagaaaagcaagtcaatttcttacacaacgcggatacaatgtggtgaatttagatggaggctataccgcatacgaacaacaacataataatgaatcatttaaattagaaaaagataaagaaattcaaatcaaagacaatcgtaagacgtttaattatagtaatctacagtgtccaggacctattgttaatattagtaaagaaatcaaaaacatcgctattggtgatcaaatagaagttgttgtgactgatcacggttttttaaatgatattaaaagttgggtcaaacaaactggacacacacttgttagactcaatgattctggtaatgaaattcgcgctattattcaaaaagaagaaaataaaaatatagaagtgacgcacacaaaaaatggaacaacgattgttttatttagcggcgagctagataaagcagttgcagcaatgattattgctaatggtgctaaagccgcaggtagagatgtaaccattttttgcacattttggggcttaaatgcacttaaaaaaattcaaagtcaacgcattaagaaaaaaggtatcgcaaaactatttgactttatgcttccaaattcaccaattaaaatgcctatttcaaaaatgaatatgtttggtgtaggaaatttaatgatgcgttatgtcatgaaaaagaaaaatgtcgatgatttaccttctcttatcaatcaagcagttgaacaaggtgttaaacttattgcttgtacaatgagcatggatgttatgggcatttcaaaagaagaactacgcgatgatgtagaatacggtggcgtaggtgcatatataggatatacagaacaagctaatcacaatttatttatataa

SEQ ID NO: 7032 - DNA, 1329 bp, Staphylococcus epidermidis
atgttttttaaacaattttatgataaacacttatctcaagcatcttatttaatcggttgtcaaaaaactggagaagccatgattattgatcctattcgtgacttatcttcatatattcgagttgctgatgaagaaggtttaaccattactcatgcagctgaaacacatatacatgcagattttgcttcaggaattagagatgttgctataaagttaaatgctagtatttatgtatcgggtgaaagtgatgacacgttaggttataaaaatatgcctaaccagactcattttgttcaacataatgatgatatttatgtaggaaatataaaattaaaagtgcttcatacacctggtcacacgccagaaagtataagttttttacttactgatgaaggtgctggagcacaagttccaatgggactattcagtggtgattttatttttgtaggagatatcggtagacctgatttactagaaaaagccgttaaagtagaaggatcatctgaaataggcgctaaacaaatgtttaaatctattgaaagtattaaagacttgccaaactacattcaaatttggcctggccatggagctggtagtccttgtggtaaatctttaggtgctattccaacatctactcttggctatgaaaaacaaacaaactgggctttttctgaaaataacgaagctacctttatcgataaactcatttctgaccaacctgcaccaccacatcattttgcacaaatgaaaaaaattaatcaattcggtatgaatttatatcaaccttatacggtttatccagctacaaatacaaacagattaacttttgatctccgcagtaaggaggcttatcatggtggacatattgaaggtacaatcaatattccatatgataaaaatttcatcaatcaaattggctggtatctaaactatgatcaagaaattaacttgattggagaatatcaccttgtttcaaaagcaacacacaccttacaactcattggatatgatgatgttgctggatatcaattacctcaatctaagattcaaacacgttccattcatagtgaagatattacaggtaacgaatcacatatattagatgtacgtaatgataatgaatggaataatggccacttatctcaagcggttcatgtaccacacggcaaacttttagaaacagatttacctttcaatagaaacgatgttatttatgtacactgtcagtctggcattagaagttcgatagctattggtattttagaacataaaggttatcacaacattattaatgtaaatgaaggttacaaagatatacacctttcttaa

SEQ ID NO: 7033 - DNA, 117 bp, Staphylococcus epidermidis
atgaggtttatgagaattgctgttatgtttttgatcacatcaataaataaaaaagatatgcactatgtaaaatatttattaaatgatataaagcgaggatacataaatgatatttaa

SEQ ID NO: 7034 - DNA, 483 bp, Staphylococcus epidermidis
atgatgaaaaaagataaagacactaatgaccaaaaaagtgagagccatatgaagcataatgatgaaagtaaagttcttgaagatatgacatcgactaatgagggagaatttaaagtaggagataaagtaacgattacagcagggcatatgccaggtatgaaaggtgcagaagctactgtaaaaggtgcgtataaaacatatgcctatgttgtaagttataaacccacaaatggaaatgaaaaagtaaacaatcataaatgggtcgtaaacgaagagatcaaagatgcacctaaagatggatttagtaaaggcgatactgttaaattagaagcaagtcatatgtctggtatgaaaggtactacagccaatatagataacgtgaaaaagactactgtttacgtagttgattacaaatccaaagataatggtaaaatcattaaaaatcataaatggatgacaggaaatgagctgaaagcacgataa

SEQ ID NO: 7035 - DNA, 1434 bp, Staphylococcus epidermidis
atgtataataaagtttttgcaattttaattataattttttccataataattattgcgtctaatgatactttcgcagaaagtaagaatgacatgatgaacatgaaagaagataagaaaaatacaatggatatgaaaaatatgaaacatcatgacgaaagaaagaaattaaattcttcacaaggaaaaaatgaaataatatttcctgaagttgcagagtcaaaaaaagataacaatggttataaaaattatacattaaaagctcaggaaggaaagacagagttttacaaaaataatttttctaatactctaggctacaatggaaatttacttggaccaactttaaaattaaaaaaaggagataaagttaaaattaagttaataaataacttagatgaaaatacaacatttcattggcatggattagaaataaatggaaaagtggatggagggccttctcaggttataaaaccaggaaaagaaaaaactataaaatttgaggttaatcaagattctgctacgttatggtatcacccccacccctctccaaatacagctaaacaagtttataatggcttatcaggattattatatatagaagatagtaaaaagaataattatcctagtaattatggaaaaaatgatttgcctataataatccaagataaaacatttgtatctaaaaaattaaattattcaaaaacgaaagacgaagatggcactcaaggtgatactgttcttgtgaacggaatagtaaaccccaaactgacagcaaaagaagagaaaatacgtttgagacttttaaatggttctaatgctcgagatttaaatcttaagctaagtaataatcaaagttttgaatatattgcttcagatggcggtcaattaaaaaacgctaaaaaattaaaagaaattaatttagctccttcagaaagaaaagaaatagtaatagatttatctaaaatgaaaggcgagaaaatcagtctggttgataatgataaaactgtaattttaccgattagtaacaaagagaaaagttctaacaaaggtaatacaccaaaagtaagtaaaaaaataaaattagaaggtatgaatgatcatgttaccattaatggtaataaattcgatcctaacagaatagattttacacaaaagttaaaccagaaagaagtatgggaaattgaaaatgtcaaagataaaatgggtggtatgaaacatcctttccacatccatggaacgcaatttaaagttttatctgtggatggggagaaacctccaaaagatatgaggggtaaaaaggatgttatatctttggaacctggacaaaaagctaaaatagaggttgtatttaaaaatactggaacatacatgtttcactgtcatatacttgagcatgaagagaatggaatgatgggtcaaataaaagtaacaaactaa

SEQ ID NO: 7036 - DNA, 2061 bp, Staphylococcus epidermidis
ttgaataataatggtgaagagcataatcatcaaaatcacatgaatcattccaatcaaatgcatcatgataaccatgcctcacatcatcatagtggccatgcacatcatcatggaaattttaaagttaagttttttgtttcattaatttttgcaatacctatcattcttttatcgccactgatgggtgttaacttaccttttcaattcacatttccaggttctgaatgggtagtgttaatattaagtacaattttattcttttatggtggtaaaccgttcttgtctggtggtaaagatgaaattgctacaaaaaaaccaggcatgatgaccttagttgccctaggtatctcagtagcttatatttatagcttgtatgctttttatatgaataactttagtagtgcaactggtcatacaatggactttttttgggaattagcaaccttaattttaattatgctattaggacattggatagaaatgaatgctgtcggaaatgctggagatgctttaaagaaaatggcagaactgttacctaatagtgcgattaaagttatggataatggccaacgcgaagaagttaaaatatcagacatcatgactgatgatatcgtcgaagtaaaagccggagaaagcattccaacagatggtattatcgttcaaggacaaacatctatagatgaatccctagtcactggagaatctaaaaaagtacaaaaaaatcaaaatgacaacgtcatcgggggttctattaatgggtctggaacaatacaagtcaaggttacagctgtgggagaagatggatatctttctcaagttatgggacttgttaatcaagcacaaaatgataaatctagtgctgaattgttatctgataaagtagcgggttatttattctactttgctgtaattgttggcgtgatttcgtttattgtctggatgctcattcaaaatgatgttgattttgcattagaacgtcttgtaactgtgttagtcattgcttgtccacatgctttaggcttggcaatacctttagtcactgcacgttctacttcaattggtgcacataatggtttaattattaaaaatagagagtctgtagaaatagctcaacatatcgattatgtaatgatggataaaactggtactttaactgagggtaacttttctgtgaatcattatgagagctttaaaaatgatttgagtaatgatacaatattaagccttttcgcctcattagaaagtcaatctaatcacccattagctataagtattgttgattttgcgaaaagtaaaaatgtttcatttactaatccacaagacgttaataatattccaggtgtcggattagaaggtctaattgataataaaacatataaaataacaaatgtctcttatcttgataaacataaacttaattatgacgatgacttgtttactaaattagctcaacaaggtaattcaatcagttatttaattgaggatcaacaagtcattggcatgattgctcaaggagatcaaattaaagaaagctcaaaacaaatggtagctgatttactatcaagaaatattacaccagtcatgcttacaggtgacaataatgaagtggcacacgctgtcgcaaaagaattaggtattagtgatgtccatgcacaactcatgccagaagataaggaaagcattataaaagattatcaaagcaacggtaataaagtcatgatggtcggagacggtatcaacgatgcgccgagccttataagagccgatattggtatagcaattggtgcaggcacagatgttgcagtggattcaggtgatatcatacttgttaaaagtaatccatcagatatcattcatttcttgaccctttcaaataatactatgagaaaaatggttcaaaacttatggtggggtgcaggttataatattgttgctgtacctttagcagctggcgcattagcttttgtcgggttaatattatcaccagctgtaggagcaatattaatgtctttaagtacagttatagtagcgattaatgcttttacattaaaattaaaataa

SEQ ID NO: 7037 - DNA, 486 bp, Staphylococcus epidermidis
atgaaaaaagtttctaaatttattttagctagtagtttaattttggacttttccgtaacgcccgaattatttaatgtcactcaagcacatgcgcaagaatctgtgaaaccttattataattatagtggttacacagcatatcaaagtaactttattctagataagaattttaaaacatctttaaaagctgataacttcaagattaatggttacaagattactcaaaacgaatcagctaaaaatgataaagatgtatatgatcaaacatattacggggtttctaatcataaagcgaatggtgttttcttctcattagacggtaagtcagtgagcgaaaaagaattattgaatcattacggtgaaccaaagtctacatctacatcagcatggggcaaagaatatacgtataaaattggaaataaagatgtaagattttatgttaatagaaatggatatgtcattaaaggacaaatcattagtgaatag

SEQ ID NO: 7038 - DNA, 216 bp, Staphylococcus epidermidis
atgaatcaattcaatcagattagtgcacagttgcttgaaattacaatatttttatcatttataaaaggtttaatacgtcatttcacagccaatgaaaatgaagaaattattgataagatatttcagagtcttatcaatgatggtaagatctcaactactttaattactaatacatcatttctttgtttaatgcatatttctaataattttttataa

SEQ ID NO: 7039 - DNA, 1362 bp, Staphylococcus epidermidis
atgaatgatacagatagaacacataaggaaaacaagttagaacaagatattagactaccttatttaaaaaaagcagttattttttcaattacttttggtttctttggtgtaaatatggcttttgcacttcaatcagcaatgatggggagaatattccaaacgttaggagctaatcctaataatttaggatggttttttattttgccacctttagtaggaatgattgttcaaccccttattggatactactctgacagaacttggaccagatttggacgtcgtatgccgtatctgttgatagctggtccgattggagcaatcgtattagtcttgttacctaatgcaggctcatttaattttggatatgcttcacttatggctttatcctttggtgcggtgatgactttacttatggatttgacttcaaatgcatgtatgcaaccatacaaaatgattattggcgatatggtaaacgaaaaacaaaaagatatggcatggtcttggcaacaaattttttcaaatttaggtggtattattgctacagtattaccatttttattaacaatgttgggaatgagtaatgtagcacctaaaggtgaagtaccaatgactgtaaaattagcttattatattgcagcagcagtattattaattgcttctatatggacagttatctccgttagggaatatgagcctaaaacgtataattattatcatggaatcaatgagaacaatagaaataataaattaagcttattacagttattaaaaaaagcccctaaacaattttggcaaattagcgtagttcaattttttaactggtttgcattgatgtatctttggacatattcaacaggtgcaatagcaaagaatgtttggaatgtgacagatccttcttcagccggatatcaagcagcgggaaattggtatggcgtattatactgtatacaatttttgagttcagttatttttggttttgtcattgcaagatctaaaccatcccaaagaaaattttggtatagctttggattagttttcggtggaataggtcttatttcaatattctttatccataatcaatggttactcattttttcatttgtattgattggtattaataatttaacgatgaatacacaaccatttacattattaactgaggcaatcgatggagaaaattcaggggcatatttaggtttatttaatacaagtatttgtctaccacaaattgtagcgtctatagtcagttttggactgtatccattattgggaagttcaatgcctgcgatgctactgcttgcaggaatcatgatgcttttaggtgcagtttcagttaaatttattaatgcaaaatttgaatag

SEQ ID NO: 7040 - DNA, 1092 bp, Staphylococcus epidermidis
atggctagagtagaaagtttaaaaagaaaaatgacacgtcttatcatagcaattatagttgtcagtgttggattagtatttttactacaaattttgcttaatgtattagaattttcaaattttggaaagtctttatacactaatttttggaaacaaccgcattacattttctcttttactagcgcatgtatcagtattatgactcctttgttaatcatttacgtgttcacacagtttttttataaaaagtacattacaactagtattaattatcttaatgatacgattcaaggattaaaaaataaccgcactgatgttgaatataagaaaatgagtatttcagaattcaataaattgattcaagaagtagaacatatacatacttatcttacaaatagtataaaagatcaattatctattcaaaataattttaaaagaaaactcgaaattttagaacatgatttaaaaacaccgttaactgtccttcaaggtcatattgaattattaagaaaaattaatcgttctaatctgtctcaggaggaaatacatttcaaaataaacaaagaagcagacattgcgttacaatctattgatagaataaataatcaattacaaatacatattaagaacatcaacctattgccaaaccattcagatacaattcatgttgataaggtaataaaaatcattaaagagagctataatcaacaatacatattaaaggagagagaactgattattgatgttgatcatgatttcccttatcataccttaagcattaacaatcaagttctataccacgtcatcgataatctaattaataacgccttgaaatatgctgaaaaacaaatatctataaagtttgaagttataaacgaacatttactaaacttcaccataaccaatgatggaagaatatttactgaagatgaactgaattctgccaaagaatgggggacaaaaggtaaagaatcaaatgggtctggtatcggactatattttgctaatattgtgcttcaacaatataatagtgaacttattttagaaaatgagaataatcacgcaaaagtaagtttcaatattcctgtttaa

SEQ ID NO: 7041 - DNA, 666 bp, Staphylococcus epidermidis
atgtataacataatgattgtcgacgatgaagaaaaaattgtgtcatttatagaagaaagtttatacttagaaggttttaacactattgtcgcttataatggacgtgacgttttaaagcaaatcgatgacaaaattgatttaatcattttagatattaaaatgccgtatatagatgggtttgaagttgctcaatcacttaaagagagtaatatacctattatttttcttactgctaaagataatcttgatactagactgaaatgtttctcgctgggtgcaaaggattacttacctaagcctttctatatggaagaacttataattcgaattaaaaatgtacttaatcaaagtcattctcaaagtttgactcccaacataaaaaaaactaaagaattaatcatttattatgatacatatagaattgatgtaaataacatgacgatagatattacaaaaaaggaatttgaaattataaaattactatctttaaatcctcaatattattttagtaaagaacagatatatgattcgattaatttaaataagacaggcaatactcaagttgttgctgaacatatacgtaaaataagaaaaaagttaagttgttatagtcgttttgaatacatcgatacaaagtggggagttggatataaatggctagagtag

SEQ ID NO: 7042 - DNA, 612 bp, Staphylococcus epidermidis
atggcaaaatttttactaatagatatcaaaactaatttagtcaaactttacataggaattttaattctattatttggtggaatgtttatttttggtgtatctaatcttaatcatgagagagttacacaatacattgagttaatatttactatactaggcatattgttatttactgctatctattctgtagatcaaaacaagaaatctaagttaactattagtgcaaagtgtcatgactaccaattcgtatttatgcttagattagttataacaatcatctatatactgttcctaattacaatcaatttatttatattttatttatttaactcaaatatcattgttttgagagatatgtttattgctttaaccagtactttatttataggatcaatatgtttattaacaagtattcttagtggtaatacattaaatggcttaatgtttggacttgtatatttcttattctgcttaggatttagaaatctaggctttatgtatttattctcagaaacctttaactttccattttatataaaattatttcaatttttattaggaattgtattattaatttttagttacactattatcaaaaaagtacaaaattaa

SEQ ID NO: 7043 - DNA, 1122 bp, Staphylococcus epidermidis
atgcgtctatttataatggaatttaaacatttaatgtttagtaagacatttctattttattgtttattgattattatattcacggttttgaattgtcaacaagtcctcaaacatcctattaattcagatgtatatcaacctcaaaatatgactatgtattctactgataaaaacataataatgtcaaatgaaattaaagaattaaagaacgaagtacatcaaaataactttaaaacgtatcaatttggatttttaaaacaaaaaaagttaaatgaccaacaaatttctaaaataaagaaactaatatcaaaaatggaaaaaacgaataattttcatcagtttaaaaattattctaatagcgtatcacatgttgttggatggggatctcaatattctaaaaataatatctcattatttggaattaagaatatgagtaagagcaagtatgttaaagagaagaatattataaaaaataaagagtactattatggagcatatagtagatatttttcagatattatgggggtagtgttaggaatacttccattctttttgagcgctcaaatgattcttcaagacaaaaaaagtaatgccattaaaacgattcattctaaatctatatcatcataccaattaatttctacacgtgtatttactattcttgttttggcatatttaccagtattattagtctcaatatattttgttacttgtttatcgatgatacatcaaatatcgatgttttctttatttattttttataaaattttaatcttgtggacattacccactttaatatttactatcgcgatgggattgtttgtcacaattatattgaattcttatttaggtgtaatgatacaaatagtaatttggtttatcaatttaaatataggttctcgtgccattgaggggtgctatggttctctattgattcctcgacataatactttatttaacgcagtttttttctataatcacttcaatcaaattttagctaatagatttacatactttggcttaggtttacttttaattctacttagtacatatatatttgacctgaaaagaagaggggtaggttttaatggcaaaatttttactaatagatatcaaaactaa

SEQ ID NO: 7044 - DNA, 906 bp, Staphylococcus epidermidis
atgaatgaaatagttatcaaaggtttgagtaaatcatatgatggaaagaaagatgcgcttaattcattggatttagtaattcccaatggtatgtttggtattttaggaagaaacggatctggtaaatctacattaatgaatattattgcaacaattcttcaaccaagtaagggaacagtaacaattaatggtattgaaattaagaattcacaaaagattagacaaatgattggttacttacctcaagattttgatttttatcctaatatgaaagtctcggaagttttatactatttaggttttttatctaaaataaatcaaacggatttcgataaatatgtagatttaattcttcgtaaggttaatctaattgattataaaaataaaaaggttaaaagtttatctggtggaatgaaaaaaagattaggtatagcgcaagccattttacatgaccccaaagtaattattgtcgatgaacccacggcgggattagatccagaagaaagagtaaggctacgcaatttactatctgatttagctgaaaacaaaattgtgattatatcaactcacattgtgagcgacattgaatcaacttgtaataggattgctattttagataaaggaagtcttgtatataaaggtgacataccatcgttgatacaacaaagtgatgatcatatttatgaaatcaatctatccccatcggagttggaatcatttagagaaaatgacttatttattactaaaactcaagaaattgaaaataaattaaaagttaggtttgtttctgaaacaaaagttgcaaacgctaaaaaagttaaagctgattttgaagatgcttatatgtattttttaaaaaaacaacaaggaggtttgaatcatgcgtctatttataatggaatttaa

SEQ ID NO: 7045 - DNA, 138 bp, Staphylococcus epidermidis
atgtatatcaaaaatacaaatgtacatgaagtttactttaaaaataaagttttactagtcaacttaaacaatggacaatgggtaagaacaagtagaaaatattttgaagttttaaacaaattggttgaatctaattaa

SEQ ID NO: 7046 - DNA, 459 bp, Staphylococcus epidermidis
atgaagtataaatatgtaagtaatgtgatagataacttaaagcggctttttaacgaattgcttgaaatacgatactacgtagatgaagaaaaaacttataaagaaaataatttaagtgtgtcttttactcttacaaataaatgcaatctttcttgtagtcattgtgctctatctgcttctcctttatcacaagatattttaagtacaaatgatgttaaatatgcaattgataagattattgacgtcaacccgaatacgcttattctaactggtggagaaccctttattagaaacgatatattagaaattatttcctatataagaactaactttaagaataagttgatgattatgactaacggtatgttaatcagaaaaatttcatttcatttaaaaaaaagaatcgtatacgtcaataagtgtgaaatggcatccttacgtgtgcacatggcgtcgtag

SEQ ID NO: 7047 - DNA, 816 bp, Staphylococcus epidermidis
atgattttagaaaagaattcaaaagcagagagatgtgaaaatgtgaaacattcgaaaaagttacttttatgtgtcagctttttattaataacggtttttattagcggttgtggttttatgaataaatacgacggcaaagaaacggaaatcaaaaaaagttttaataagacattaagtatgtatcctatcaaaaatcttgaggacctatacgacaaagaaggatatcgagatgaagaatttaataaaaatgacaaaggaacatgggtaataacttctagtattaatattcaacaaaagggggaaggtttaaaaactagacgaatggttttatttatgaatcgaaatacaagaacgtccaaaggtaagttcatgataactgaagtaaaagaaaaaagtgatataggatttcagactcgaaagaaagaatatccagtcaaattgattgataataaattcattccatctaaacaaataaaagatgaaaaagtaaaaaaagaaatagaaaactttaagtttttctcacaatatggcaattttaaagatttaaaagattataaagacggtgaggtatcttataatcccaatgcgcctaattattcagctaaatatcaactcagtaataatgattataatgtaaaacaaataagaaaaagatataatattccaaccgaccaagcccctaagttgttattaaaaggtacaggtgatttaaaaggttcatccacaggttctaaaaatattgaatttacttttgtagagaaaaaaggagaaaatatttattttactgacagtgttgaatacacgccaagtgagtaa

SEQ ID NO: 7048 - DNA, 858 bp, Staphylococcus epidermidis
atgattgaacttaacaaatttataaaagtaccggatttaaataaaactaaaataaagtttaatatgaatgcaggaaatgttgaaataaaagcttgggatttactttttaaagaagatgaaactgaatgggaacaaattaatgcatggaaaacgaaacatccaaataacaatttgaatcatgcagattacttactagcttttgctcaatattatccctatggtccagaatattttatttttgggggattatataaaattaaaaagattgaacctgaagtttatgatgaggtaggttatgaattaactttaatggaagattataaggaatacagaaaaagacttatcgttaaattaaaaaaacctataggtagagatttatataatagattatataaaaatattcaagatactttagaacctgaggtttatgaaattgctcctaatactaaattaggacattttcctggttatcagaatgtaacgttatcccacccacaaatgcaacaaattatatcaagaaatgaacctagttggaaacaagctttaatgaatgtaaaaggtgtttatgttataaccgatttaagtaatggcaaattatacataggatcagcatcaggtaatacagatggaatatggcaacgatggtcggactatgccaatatagaaaatctaacaggtgataataaattattaaatgaaattaaattagataaaggaaaagattacatcgtaaataattttcaatattcaattttagagatttttgatacaaagactaaagcagacactataatcaatagagaaaattattggaagaatgtattttgcactagaaaatatggtatgaactataactaa

SEQ ID NO: 7049 - DNA, 705 bp, Staphylococcus epidermidis
atgacaaatgaagttaataaagaagaaaaaattaaaaagagttttgagaaaacattaagtatgtatcctatcaaaaatcttgaggacctatacgacaaagaaggttatcgagatgaagaatttgataaggatgataaagggacatggttactacactcggaaatggctatacaacgtaaaagagaagatttagaaactagaggtatggtgttgaaaataaatagaaatacacaaacatctaaaggtgattatataaccaataaatttacatacgataataaaggaagacctcaaaataataagaaaaaatatccagtcaaaatggaaaataataaaataatccctattaaaaaaattgaagatagtaagataaagagggaaatagatgaatttaaattcttcgctcaatatgcaaattttaaagatttaaaagaatataagaatggaaatatatcatacaatcccaatgtacctagttactctgcagaatatgatttagaaaatagcgattataatgtaaaacaattaagggaaagatatgatattccaacgaaacaagaaccaaagttattattgaaaggtacaggtgacctaaaaggttcttcaattgggtctaaagatattgaatttacttttatagaaaaacctaaagagaacatatatttttctgatagtatgaactttatgccaagcgaggatgattaa

SEQ ID NO: 7050 - DNA, 225 bp, Staphylococcus epidermidis
atgaatcaaaaaaattataaaattagcagtcagaatattcaagctcactctgaagaaacaagctcaatttccgtcattagctatgatatagaaaatgtaaacgataataatttaaaccgtgatgcaatacgtgagcaaataaacgattataaaataaaaggagagttcccttcaaaccttgaatatgttgatagatacatagatcctaatacaagaaccacatag

SEQ ID NO: 7051 - DNA, 819 bp, Staphylococcus epidermidis
atgattttagaaaagaattcaaaaacagagagatgtgaaaatgtgaaacattcgaaaaagttacttttatgcatcagttttttattaataacgatttttattggtggatgtgggtttatgaataaagacgatagtaaagaaaccgaaatcaaagaaagttttaataagacgttaagtatatatcctatcaaaaatcttgaggacctatacgataaagaaggttatcgagatgaagaatttgataaggatgataaagggacatggttactttattctaggatgagtatacaaccgaaaggaaaggccttagaatctaggggaatggtaataaaaataaatagaaatactcggagtgcgaatggagaatatgttattaataaattttcttctgatgagaaaggcgaaaaccaagatactgaaaagaaatatccagtgaaaatgaagaataataagattattccaacggaaaaaattgaggacagtaaaataagagaagaaattgaagaattcaaattttttgcacagtatgcggattttaaagggttaaagaactataaaaatggagatatatcatacaatcccaatgtacctagttattcagctgaatataatttagaaagtaatgattacaacgtaaaacaattaagaaagagatatgatattcccaccgaacaagcccctaagttgttattaaaaggtacaggtgattttaaagggacctcacttggttataaggacgtaaaatatacttttgttgaaaaccaaaaagaaaatatacatttttcagatagtataaaatttatgcctagtgaggattga

SEQ ID NO: 7052 - DNA, 969 bp, Staphylococcus epidermidis
atgaaatactgtacaaattgtggacataaaatcaataacaatcaatcattttgtaataactgtggaactaagctacatgattctcgaagcaatcaacaaagtaatcacaataaaaatgctaaagttagaggagtaaatgatcgatacacatattattatcgagataataaccaacataaacgttctggttttggaaaagtgctaatagcaatacttgcagttgttattttaggtttactcgtatctggtctttattttgcttatcatcaatttaaaagtcataacagttctaatggcacgacacaaagtcaaagttcaaatacgtcagatgataatgctcacggcgctcaaatcgatatttttagtgatacatttgaccaatcatatattaaatcaccttctaaagatggctatgcagaaatatataacggtatgagtcgctcaggtgttgaaacgaaatatgggcaatccaatggtacaatctatttacaaggcagtacatatgaaaagtatggtgatttagctgtgatgtacgatgaatatgatgatgtgagccaagtcattgtaacaccaagtaatataacggaagacgactatattgaacattacggtgaacctgacgatagagaaggtaacatctttatttatgatgcatataaagataatgattttagtgtcttagtaacaattaaagatggaatggtgttagctatagagaatgttgatcaattaccaagcaattcttcagacgatagcgatagtaatgaagtatcaagtaaaagtgaggcaagagccattgcgaatgatgtgttagatagtagtgattggatacactcagttgatgaaggtgaattcaattatagagtcaattatggtagagaaaatgaagatagagcacatcgtgcaattatagtagaaaaaaatgatggcagcacctcagaatgggatggcgatgagtgggactattaa

SEQ ID NO: 7053 - DNA, 504 bp, Staphylococcus epidermidis
atgaatacaatcaaaagtgcgatacacacagaagcgatttttagcgatgatgaacaacactgctacttactcaagaaaacatgggatgaaaagaaacccgcttgtacagtgataacgatgtatcctcatttagatggtgtattatcactcgatcttactacggttctcatcctcaatcaattagcgaattctgaacagtatggtgctgtatatcttgtaaatctattttccaatattaaaacgcctgaaaacctgaaacatattaaagagccttatgacaaacacacagatatccacttgatgaaagcaataagtgaaagtgaaacagtcattctagcctatggtgcttatgcgaagcggccagttgtcgttgaacgtgtcgaacaagtaatggaaatgttaaaacctcataaaaagaaagtcaaaaagcttataaacccagcaacaaatgaaatcatgcatccacttaaccctaaagcacgtcaaaaatggactttgaaataa

SEQ ID NO: 7054 - DNA, 222 bp, Staphylococcus epidermidis
atgaaccatgaaaccgcaaactcagactggcgaacggttgctagttgtttagcatcgcaagattatgtatcaatagaaaaaggtttagtacaccattttacagcaattgaagatgaagtaatactggataaagtctataatgattttatgaatgatgattctataacaacggtacttaacaatgattttcaagatataattaatcattatttaacaaaatga

SEQ ID NO: 7055 - DNA, 1869 bp, Staphylococcus epidermidis
atgaaatctgagatacaactagttgaagttaataatgaatttgtttttgttgatagtatagacagtgatcttacgaacagaaaggttcatagaactttaaagaaattcacaagttatttttctgatttcactaattatgttttaaaagtggatttatcacatcttgaaatagaaagattagtttcagagctgaataaagcattagctaaagtatcgaaacctgatatattaatagataataatataaaaagttttattagtaaaaatgcttatgctattaatgaacaaagaattgctggcttaacaattaaagaaaatgattcaagatggcaagaagaactttcaaattttaataatgttataaatcaagagattacaagaccattaaaacctattcaagtaagagcgagtttttatttagccaccatgaaaagagcagccaatttttctgtacctggagctggtaaaacagctatgatgtatggcacatttgcttttttgtctagtgaaataaagcggaaagttgataaattaatagttatttctccaattaatgcatttgaagcttggcgttcagaatttattgaagtttttcaagataaaagagaattacactttatgaacctaagagataaaaaatataatgatttaggtaaagtacgaacagattggggaagtgcaaatgtcattgttttgaattttgaagcaatacaaaagtatgtaggggttttaaatgaacttattaatgataagacaatgatagtttatgatgaggttcataggataaaaggtactaatagtagcagagcaagttatgcattaactttaggtcctaaaagttattacagatacgttttaactggtaccccaattccaaatagttatcaagacatatttaacttcttaaatattttatataaagatgagtatgatacttattttggttggaatgttgctgatttacaaaatcctgatcctaatgaaattaatgacaagttgaacccttttttctggcgtacaaataagaacgatttggaagtgccccaagcagaaaatgatattatattatgtgttaagcctagtaatattcaaattgaattagcaaaagcgatatacgaaaatgaatctgggatactagcaatttatataaggttactacaagcttcaactaacccagaattattgcaaaagaatattaactatagtgaactaggaatgttgaatgatgaattaaatttcgatttggataaagcattaaataaagaagaagaaaatcaagtaaaacaacaaatttataattcttttgatttaaaaaatgtaacttctccaaaattcgaaaaaggtattgaattgattgaaaacttagttagccaaggaaaaaaagttctagtatggggattgtttgtaggtacaatgaataaaatcaataaaagattactagaaagtgatattaattcaatattgatttatggagaaacacctaaagaagatagggtagatatgatcaataattttaggaatggaaatgcacaagttctaatatctaatcctaatacattaggcgagtccatatctttacatcagacagtacatgatgcaatatatcttgaatataactttaatttaacgtttatgttgcaatcacgtgatagaatacatcgtttagggttaaataataatcaatatacaaggtattattatttgatgtctgaaggggatagagcccataaaggttttatcgataaagcagtttataacagactgaaggaaaaagaagatgtaatgttaaatgctattgatggaaatactttaaagccaatgattgaagatgattacttagaagatgttaagaaaattattattgaatga

SEQ ID NO: 7056 - DNA, 1290 bp, Staphylococcus epidermidis
gtgggagaaacagaaaaaatttcattacttgaaaaagtccgagatggtttagtagataaaacaggagcaaaacctaagttaccaacaactattactgatttaaatcaagaaactttagaggtatatagaataccactaaagtttctgtattataatgatagaaatggaagaattgcttctgtaatatctagagtaagcgacgatataaaggttgcttatgaatttgaagataataattataataaaagtattgaaaatatgatatatgagactaatacctctgctttaaaaagcactaaaaaatctattaaagataaaggtcagcaagtatttggttatgtattagatgatggtagagttattgacggaaatagaaggtttactgcgcttaggcaattagagcaagaaacaggtaagactttttattttgaagctgtaattttaccatttacttatgataaaaagactgatcgagctaaaatcaagcaattagaacttgcaatacaaatgggtattgaaggcaaacaagattatgataaagttgatgaagcggtggatatttatcaaactattgaggttgaaaagttgatgactatagctgattatgcaaaagagtcaaataaaacaaaaaaaactattgaaaaacaattaggttctgcaaaattaataagaaaatttttagattttattaatgcacaagagaattcctattacattataaaagatgccggcatttattcactatttgaagaagcagtacctaaatttgataaggcttatcctaaaggtggaccttctttagaagatgctattgaaaaattttttagttttgtccttttgcaaatccaatcagggacaagcacacgtgcatatgctggaagagattattttgaaaatattgttttttcagatgaaggtaatcaacaatttaatacagaaacagaagatgcaatcgatagtttgagagataaattagaagaaaaaaatatagaatctaccgcagatttaaaaagtactctaagccaatcgatacctgaactaagagaagtaagttcttcatataacaaagttgtaaacaaaagtaaacgagatgctaatgtggaaagttttattgataatgttaaatcaatgtctgaaagcctaagcgatatggaaaaaggtaatggtttaccaagtagccttaattttgaacagtttgatctaaaacaattaaaagaaattagagaaatgctaataaaaataaataattgtagtagagagttgatagatatttatgaacatgaaatctga

SEQ ID NO: 7057 - DNA, 2958 bp, Staphylococcus epidermidis
atggaaatatttttagaagaattaaaccatcaaaaacaagctatagacagtgtgatttataattttccgaatattgatagaaatgcgcagtatacagaatttagtaatcctttattaaaaaatagaggagaaatattaaataatatcgatataaaaatggaaacaggcactggtaaaacatatgtttatacaaggatgatgtatgaactacataaaaaattaggtatatttaaatttgtgattatcttacctagccctgccattaaagaaggaactaaaaattttttaaatagtaactatgcatctgaacattttaaacaattctttgaaggtgtaaatatacaagttaatgaaattggagcaggagattttgattctaagagaggtaggaaaaatttccctccacagctaaatgaatttattgaaagtagtagtataaatgaaaatcaaattcaagtattaataattaatgcaggtatgttaaattctaaaagtatgaaacgtgatgattatgaccaaactttattaggtggatttacaaatccaatagaagccatacaagccattaacccagtagtaataattgatgagccacacaggtttcctcgtgaagggaaatattacacatctgtaagtagtttaaagtcgcaagttattataaggtttggagctacttttcctgaaataaaaaaaggaactgggaaaaaagctatatatattaaagattattatcgtggtaaaccacaatttgaattaaatgctgttgatagctttaatcaaggtcttgtaaaggggatagatatttactacccaaaattaacgccagaacaagccaaaaatagatataccattgacagtgtaaaatccaaagaaattgttttgaaaaaaggagaaaataaatggacgctaggcgtaggtgagaattttgctaatattgattcgttatttgaaggtgacttgagttatgctggtgctaaaactttatctaatgacttagaaattagtaaaggtatggatttattgcctggcacatttacaactaattaccaggagttaattattaatgatgctatcaatcaacattttgagcatgaaattaataattttatgagagaaaacctaaaagaaaattttcaaccaaaagtaaaaacactttcactattttttattgattctattaggtcatatagaaataaagatggctggttgaaaaagacttttgagagacttttaaaagttaaacttagaaaattaataaaagaatttgaatttaaaaaattaccacgagagatcgaatacttagattttttaaaagctacatacgagagtcttaatagtgaaaatcaaatggttcatgcaggttactttggtgaagacagaggttccggtgaagaagcaatacaagctgaagtaaatgacatacttaaaaataaagagaaaatgttgagttttaaggattcgaatggtaattggattacaagaagatttttattttcaaaatggacactaagagaaggttgggataaccctaatgttttcgttattgcgaaattgagaacttctggttctgaaaatagcaagttacaggaagtaggaagaggattgcgtttacctgttgatgagactggtcacaggttaacacaagatgaatttccaagtagactttcatttttaattggatatgatgaaaaggatttcgcagaaaagttaattggagaaataaattctgatgttgacgttaaattaagtgaagacaaattaactgatgaaatgattaataaaatagttgaacatagaaaacaaatgaatcctcattataatgatgaagtgttattagaacaattagatgaacgaaatctaattaataggaaaaatgagtttaaaacagatgttgaaattgatggagttaaaaaatcaggatttgaatggttgttagaattatatccagaagttaatgcatctaaattgaatgcagataaagtcagagatatgaaaaaaaatccacccaatttaaaagtgaagttaaataaagagaattggaataaattgagattcttatgggaaaatttatctaaaaaatatatgttagaattcaaaaagatgagtgaagatgatctgtatttttttgttgaaagattgttgaacgacgatgatgtatttgttaaacaacaaccagaaagaatacatcaatctttggaaaaagatgatgaaggtaaacaagttatcaaggaatcaatttcagaatataattatagaaatgaatttatttatatgaactatggtaagtttttaaaacaaattgtacttaaaactaatgtaccaatatctataatgcataaaaatttactttccgttttaaaagataaatataatagtgatgaacgattcttgagtgaattaagtttaaataatataataagagaatttaacaagcgttttgaagaaaaatatagtcaaagttatgaatataaaaaattagatttttctgccactacaaccatttatgattcagaaatatcagagtttaaagattgggtagatgcaaattatttaggtactaacgttgaaaataacattcaaactgaaaaacgatttttatatgaaagaccaccagttagatatgatagtgtaacacctgagttagagttgttaaaaagaaattacgataaaaatgtaactgtatttggtaatttgcctaaaaaagcgatacaagttcctaaatatactggtggcactactacgcctgattttgtctatatgatagaaactgatgaacaagatgtaaaatatcttattgttgaaacaaaagcagaaaacatgagactaggagataaaagtattggtgaaatacaaaaaaatttctttaacacattagataatttgaatattaaatatcaattagctactagcgcgcaagatgtttataatgaaattaaaaaattatatgattcaaagtga

SEQ ID NO: 7058 - DNA, 1947 bp, Staphylococcus epidermidis
atgatatatgataattataaatataatgatacgattaaaagaaatagcgaattattaatgagattacaaaagcatttccctgaatttatagaaaataataatgaggaaatacaatttaattatgaaaaatttaaaaatgatttaaaatcacatgacatagatgagtttaagcatggattggaattaaattttataggtaaaagttatgcaaagaagcaaagtggacaaaaaccaagctcggtaattgtacctaatgtaatacataataagaagtcagcgaacaaagatagtgaaaatttgtattttacaggtgataatttagaagtgctgagacatttacaacaaaactataaggactctgtagattttatttatatagacccaccttataatactggaagtgatgggtttttgtatcctgatacctttgaatatgatgatagtaagctaatgtcgatgttttctttttcagaagaagagatgaagaaatttaaaaatatacagggtaaatcatcacattcagcatggttgacttttatgtatcctcgtttgtatttggcgaaaaacttattgaaagaggatggtttgatttatgtttcgattgatgaaaatgaacatgcgaatttaaaactaattttagatgatatatttggcgaacaaggattcattgaaaactatatttgggaaagtaattttagacctgataattcttcccaaatttatcgaaaaaatgctgaaaatattttattatatgttaaaaacaaacaaactttaaacaaactttatgggactacaaagaaaagcaatggcttgccttccttaactaagaactctatgaagatttctactgtaaaatttaaggctggagtggttgagacatttctaaaaaatggcatttataaagctggagaaactaaaagtggttatatacttgaaaatgatattatagttgaggatggaataattaaatctgatttttcattaacaggtagattaatatggggacagacttatttagatgaacaaattaaaaatggaactaaaataattattaaaaatgaaagctttgttccttattcagaaaagaaagaaacaacttctgcacctaataaaattatacctaaagattatgtcagtgacgttttatctggaagatctgaattaatgcaaatatttaataatcagcaagtatttaattacccgaagccaacgtcactaatagaatacttattgaaaacaataggtaaaaaggatgcagtagttttagactttttttctggttctgcaactacagctgatgctgtattaaaattaaacaacaaagatgaaggtagtaggaagtttattcttgtacaattaccagaggaaatctatattgagaaaaaaggaaaaaaaatagcaaaaaaaggaagcgaaacagctttcgaatatgggtttaaaacaatagatgaaattggaagaaaaagaatagaaaaagttgacgaaaatttagataactgtggttttaaacattactttgttaaaaatctttctttcagaaatatagaagaattatatgatataagtaatttagaattagatttatttgatgatatggaatataaattttctgcagacaacctagaagtaataggaggagcaaatagcaaagatacaatattaactacatggttagttcaagatggttttaaattcaactttaatctaaagacgctaaatattaatgattatgaagtaaactatatagaagcgagtaggatatatttaattgaaaaaggatggagtacagaaaatacacgtgaacttattaatttaattggaactggacgtataaatgtacagacaatagttatttttgcatactatttcaactttgaattagttagagagttagaaatagccttatcacaattagataataaagtcaatttattaaagaggtattaa

SEQ ID NO: 7059 - DNA, 219 bp, Staphylococcus epidermidis
atgattgagaatgaaaaagaactaatcaatgaatgtccagaagaaatagacggcttagttaaagagattttcaatctaaaaggcacactcatatatggtttcgaaggtaaaactggtgatgcgatggtggaaacaactgctaaatatcattctaaagttctcgatgattccgaaaatgtaaaagaatgtgtcgacagctgtaagttatactcatggtaa

SEQ ID NO: 7060 - DNA, 114 bp, Staphylococcus epidermidis
ttggatatcgtagaagatggcaagaaactaatagaagaaaccgcaaaaagaggtaaagaacttgcggaattacaaatgattaaacataatatgaaagatgaattaaaaaaatga

SEQ ID NO: 7061 - DNA, 183 bp, Staphylococcus epidermidis
atggccgtttcaccgattggtaaagatggcaaagtggataatgatactgtttattttgcttatgcgggcacaagtcctaaagaacctgctgacctaggcatagatgttcttttggggttatctggaattacgaataaacaagttgaaaccaatcctagaccaagtatcaagtggtggctataa

SEQ ID NO: 7062 - DNA, 156 bp, Staphylococcus epidermidis
ttgaataaaaaaattattttcatgattattataattattagtatagtattaatagttggagacgtctatttaaaaatggaatatgatgaaaagaaagagtcagaagcaaaatattatgatgaacaagaaaaaaataaccttatttttaaaatataa

SEQ ID NO: 7063 - DNA, 285 bp, Staphylococcus epidermidis
atgaacaagaaaaaaataaccttatttttaaaatataatatgaaagattttagaggtattaaattcactgaacataaaagaaatcaaatgggaaattttgtttttaaaggctatgtaaatgatgataagaacaaaaactttacagctacggcatatcatgacgatgattatcaatttgaaggaacaattggttggagtgaaggactaagtgaacttgagaaggtagacttgaaatctgtatctgaaataaaaaaagaagaaaaaaataaaaaagatgaaaattaa

SEQ ID NO: 7064 - DNA, 399 bp, Staphylococcus epidermidis
atgaaaattaaatatacattaatagcattattagtaattacgattatagttttcggtatctactttaaaattcagtatgacaataaaaaagaagcagaggaaaagtattataacgaacaaaaagaaagaatcaccctttatatgaaacataacgtgaaagattataaaaccattgaatttacagaaattaaaaaaaatccaatggatggttatgatataagcggttatattaacaatgataagaaattgtcatttagtgctggtataagatccaccgaaaattttcaatttaatgcagacatagcttattcagatgaattagatggtaaatttgtaaaaaatacaaaaacggtaccacaaataaagaaagagcaagaacataaacaagatgaaaattaa

SEQ ID NO: 7065 - DNA, 177 bp, Staphylococcus epidermidis
atgtttagagtggatagaatagaaagtattacagtaactgatgaaacgtttgaacagcccgaagacttctcagtagacagctatttcatggttaatttattaccaattatggaaaatgatatcattttctcatttaagaatatatcagaaatagttgtagttatcacatttttgtga

SEQ ID NO: 7066 - DNA, 189 bp, Staphylococcus epidermidis
ttggaaatattagaatattgtgtaactgatagaaattctgtaattattttatatcgaaaaggcggcgatgacgtatcacaagacaggcagtttgatccatatagaattatttattggaaaaacaaatggtatttagttgcatattgccatctagggacgatgtttgaatgtttagagtggatagaatag

SEQ ID NO: 7067 - DNA, 165 bp, Staphylococcus epidermidis
atggatacacttttaaaaagtggcgtgcctatcatttcagatactggacaaaatggtgaatatacgttgttaaatgatttttatgaagcgcctttgttttttgatgttgaagaaaagaagtcactgattcataccgcaggttttgcagaagaagcgggttattaa

SEQ ID NO: 7068 - DNA, 438 bp, Staphylococcus epidermidis
gtgtttggcgtgatcggcttcgccagtgcatggctgccggcgtatacagaccggctcgacctctggtgcatcgatggcgatgccgtacgttggctgggcgtcgtgctctacgccgcaggcggcgcgttgcgtgtgtggccggtgtatgtgctgggcaatcgattcagcggactggtcgcgatccagcccggccatacgcttgtgaccggcggcatctaccaatacgtgcgcaacccgagctacctggggttgctgatcggcacgctgggttggggactgacgttccgggcactggccggtgtggtgctgacgctcttgctgattccaccattggtggcgcgcatgcgtgcagaagaagccctcctgcaatcacagttcggtgcggagtacgacgcctaccgcgcccggacgtggcgcctcattcccggcctctattga

SEQ ID NO: 7069 - DNA, 126 bp, Staphylococcus epidermidis
atgaataaaggcgagggcggtggggccgacgagctgatcgtcgagtccctcaatacccgcctccctggcggcaatgcgggtcagggtgttcttcgcaacggcgtaggtggcgtcactccccagtga

SEQ ID NO: 7070 - DNA, 351 bp, Staphylococcus epidermidis
gtggccaagggtttgaagaacttcgcaaaggacaacccgctcctggtcattaagggcggtgtgatggacggtaacgtccttgacgccgaccaggttaagaagctcgccgatctcgagtcccgcgaggtcctcctcgccaagctcgccggtggcctcaaggccaacctcacgaaggccgctgtggtcttcaacgccctgccgtcgaaggccgcccgcggcctgggcgctttgcaggagaaggctgctgccgagccgtctgtgatcggtggagctggagaggcttccgaccaggagcccaagacaaccgagacccctgaggcgtccgccgcccaggacaacaccaacgagtga

SEQ ID NO: 7071 - DNA, 117 bp, Staphylococcus epidermidis
atggaaacttcagttcttatccccacaaatgatatttcacgacatgtaaatgatattgtagaaacaattcccgatactgaattcgatgaattcagacatcatcgtggcttaatataa

SEQ ID NO: 7072 - DNA, 144 bp, Staphylococcus epidermidis
gtgggaatcctgggagataaaattcaagttgagatttgggtggggacacagccaaaccatatcaatggtatagtgtgtgaattacttaatcatgcacctcaatttttctttgaattttttggtgttcttattcccttaaaataa

SEQ ID NO: 7073 - DNA, 513 bp, Staphylococcus epidermidis
atggcaaaatataatgtggaaaatgaatatgtagaaatcgacattgagagattactcaaatatacaccagaggtcgtttatgaggcatggacaaaaacagatatcttaaaaaaatggtttatgaccattcaacgcacgaataaatcatttgatgcagatattcaagagggaggaaagtatcgcatcattgatagtagaaacggtaaacaaaacatcattgaaggtacatatgaagagttagttttagatgaatatatcaagatgacgattggaatgccaggactaagtgaggaagaggatgtcattgaagtagagttctttgaaagagagaatggcggaactcaaatgttcttttactatcgctcttttgttgaaaaggaaagacgtttaacaacattagaatataagcaaaagaaaaaagaatatcatgattcaacagcacatggatttgaattgatgattgatcaaatgcaaaatgtgatagatgaaattgaggaacagcgtcataactaa

SEQ ID NO: 7074 - DNA, 1302 bp, Staphylococcus epidermidis
atgaaagagatgaagaatggcaatgcttgggcattaattcctttattgttatttgtcttactatttctaggtgttggtattatttctggtgattttaccactatgccattaaatgttgctattacaattactgttattgttgccttacttatgaaccgcaaggaaacttttgcaaaaaaagtagaggtatttacaaaaggtgcaggtcactctaatatcattttgatgatgcttatttttatccttgctggagctttttcgacgactgctgaaaaaatgggaggcgtgtcatctacagttaatttaggcttatcacttattcctcaaaatctaataattgttgggctatttattatttgtatgtttgtatcaatttcaatggggacttctgttggcacagttgcagctattgcaccagtaggttttggatttgcacaagcaacagatgtaccagctgcattagccatggcaacagttgttgggggagcgatgtttggtgataatctatctatgatttctgataccactattgcagcagtaagaacacaaaaaacaaaaatgagtgataaatttaaagtcaattttaaaattgtactaccaggtgcgattattacaatcatcattttattctttttaacaaatggtatttctatagatcatactaaaaactatgattataatttaattaaagtcataccatacttattagttttgattcttgcgttagttggtattaatgtaattattgtattaataggaggtactgtattagccggtataattggactgattgatggttcttttggttggaatggccttttaaatgctatttctaaaggtattatcggaatggaagatattgctatgattgcattgcttataggtggtctagtaggaattatccaacataatggtggtattgattggttgcttaattttgtaaggtcaaaagtaaaatcaaagcgtggtgcagaactaggtatagcgagtttagtgagtgcagctgacatttcaacagcaaataatacaatttctattattatggctggaccattagctaaaaatattgctgatgaatatgatgtcgatccaaggaaatcagcaagtatattagatatctttggtggatgttttcaaggattattaccatacagcccgcaagtgatttcagcagcaggtgtagccggaatttccccattcctaatgttacaatatagtatttatccaatattattaggtgtttgtggattagtagcaattattttaagagtacctcgtttaaatcaatcgtcaaagaaataa

SEQ ID NO: 7075 - DNA, 588 bp, Staphylococcus epidermidis
atgaaagcatatctatataaattcatgccattgctcattttcgtcataggactgattatcttttacgtttttaatgattatcccacattgatacatgtcatagtgattattgcttttataacgaatggattgaaaaatgtatattttgttaataataatattagaaatcatatgatatgggtgagccctaaactcgatcgtatccttggtatgatttcgggcatactatattttggtatttacgtggttggctttataaagcaacagcctttatggatagtgatacttattctagtatcaacagtgggtactgcggttttattagaaacaaaattacatattacatcacttcaattagaggagacgttatcatctgaacggataaaacgtaaagtaatatcaagacataaagcacaacgtcttaagtgtatattttttactgtgattgttgtagtaatcatttcaatgctcatatcattatatttaaagttgatggttatttttggacttgcagtaacgatttttatcttagcatcaataagtgtggctattttcgaaaaatactttactattattgaaaatatgtaa

SEQ ID NO: 7076 - DNA, 612 bp, Staphylococcus epidermidis
gtgaaaaaaataaatgctgaaacactttcagatatgcaaaattataaattacttagtggaagtattatacctaggccgatagcatttgtaactactcaaaatttaaaaggggatatcgacgcagccccgtttagtttttttaatgtagttaatcatacaccacctatgattgcaattgctgttcaacgtacaaagggaaatagaaaagacacctcaataaatatagaacaatctggtgagtttgtagtgcatattactgatgaggctattgttaatgatgtgaatgaaactgctgccctgttagaatatggtgttaatgaacttaaaagaacctctctaagtatgattgattctgatttaattaaagttccagcaatcaaagaagcaaaagtaaggtttgagtgtaagcttcatcaaatagtacaattggacaacaaagataacgggagtgatttgataattggtgaaattgtcatgtaccatatcgatgaagaggtttattttgaagatagtaaaattgatgcaaatcaattaaatccggtagctaggttagctggaaatgattactctttgttaggtcaaacatttacggttaatcggcctacctcataa

SEQ ID NO: 7077 - DNA, 882 bp, Staphylococcus epidermidis
atgtcagctcaagatccgcgcaataaatttaaaactgataattatgaaaaacaagaacaagaagttccaggtatacaagctaaaatgtcaccacaaccagattgtggggaagattcttatcatggccaccatcgattagatggctttaaaatactagtgactggtggcgattcagcaattggacgtgcggcagcaattgcttatgctaaagaaggtgcagatgtagcgattaattatttaccaagtgaacaacaagatgccgatgatgtaaaacagattattgaaaatgttgggcaaaaagctatcttaattcctggtgatattagagatgaacaattcaactatgacatggttgaaaaggcttatcagcaattaggtggtttagacaatgtaacgttggttgctggtcatcaactttatcaagatgaattatcggagtttaaaactcaagattttaccgaaacgtttgaaacgaatgtctatccggtattttggacagtccaaaaagcgcttgagtatttacaaccaggaggctcgattacaacaacatcttcagttcaaggttataatcctagtccaattcttcatgattatgctgcaacgaaagctgcaattatatctttaacaaagagtttttcagccgaacttggccctaaaggtattcgtgttaactgtgttgcacctggaccgttttggtcaccacttcaaattgtcggtggacaaccacaaagcgctatacctacttttggacaaaacacaccgttaggacgtgccggccagccagttgaatgtgctgggacatatgtgttattagcctctgatgatgcaagttatattaccggtcaagtatatggtgtgactggtgggactcaaatagattaa

SEQ ID NO: 7078 - DNA, 1119 bp, Staphylococcus epidermidis
atgacaaattattctacttatgtagattggagaagaacgtttcatcaatatcctgaactttcagatgaagaatatgaaactacagaaacgttacgaaaaatactcaaaagttatggtatacgtatactggatgtccctttaaaaacaggtttagtagcagaaattgggcaaggagaggaaatgatagcggtaagaacagatattgatgccttgcctatagaagaacaagtgaagcatgaatttacatcaaagtatcagggtgcaatgcatgcatgtggtcatgatattcatatggcaagtatattagctactggtattcaactaaaagagattgaagatgaattaaatggacgcgttcgattaatatttcaacctgctgaagaattaggacatggtgcatttgaaatcataaatactggagtacttaaaggagctaaagcagtacttggttttcataattatcctactttaaaagttggtgaatttgctattaaatcgggtgcaattacctctgctgtcgatcgttttgagtttaatgttaaaggtaaaggtgcgcatgctgcaaaacctgagcaaggaaatgatccagtcatcgtcgtaggacaacttatcaatagtttacaaactattgtgagtcgaaatttatcagcttttgatagtgcagttgtaacaatcggtgaaatttcttgtggtaacacatggaatgttatagctgacaaagcttatatacagggcactgttcgctcattcgatgaggataaacgtcattatattgaaaataggatgaaaaatattgctgatggtttaagtcgtgtttttaatgtggatattgatttaacttattcaagactacctggtgcagtagtaaatgatgcacatctaacacaagaagcaatcgaggtcgctaaaaatgttggctatcatgtatcaatgctcgatgaaccggttactattggagaggatttttcaggttatacagaagaataccccggtgttttcgcatttattggctccgacagtaaatatgatttacatcatcctaaatatcatccagatgagcgtattttggaaaaagttcctcaatatttcgttcagctcgttcaacgtttattgacataa

SEQ ID NO: 7079 - DNA, 936 bp, Staphylococcus epidermidis
atgtatcaacttgcacaatctaatctatggacaggtcgtttagatagtgaaactgatcctacacaatttaggcacttccaaactgttaaattcggtgatttaagtcaattagatttttcggatgaacacaaaggcgtgggcttattaggatatgcaattgataaaggagtagaattaaacaaaggacgtgtaggtgcaaaagaaggtcccaatgacattaagcgagcttttgctggattgccagatttgaatcaatgtgaagagattatagattatggtaatgtagaacacaatcatgagttgctaatagatacacagcgcgaattcgcagaccttgctgctaagtctatcaaacgacataaacaaacatttttacttggtggcggtcatgatatagcatatgcacaatatttagctactcgtaaagtttatcctgagtcgtcaataggtgtgattaatatagatgcgcactttgacacacgcgatgagggttattcaacctctggtactagttttagacagattctagaagaagatgataatgcagattatttagtgttaggtatatctcaaggtggtaatacacaagctttatttaattatgctaaagaaaaagatattcaatttgtatatgcagatgaattactacatcaggtatctccccccattaaagatatgatagaacgttttatccataatcatgatacggttatgttcacaatttgcatggatgtagtagatagtgcatttgcaccaggagtcagtgcaccagctgtcctaggaatatatccacatacagttttcgaacttgctaaacgggtcattccaagtgaaaaagtaaaatctataagtatagctgaaatgaatccgacgtatgattcagatcaaagaactgctaaattagttgctaatttagtacatcattgtttaatttaa

SEQ ID NO: 7080 - DNA, 1149 bp, Staphylococcus epidermidis
atgaaaaactctagattttctgggttccaatgggctatgatggtctttgtatttttcgttatcacaatggcattgtccgtgatactcagagattttcaagcgactatcggagtgaaacgttttgtctttagtattaaagatttagctcctttcatagctgcaattgtgtgcatattagtatttaagcacagaaaagaacaattagcaggattgaaattttctatcagtttaaaagtgattgagcgtctacttttagcactcattctaccacttatcattttaatgattggcttgtttagctttaatacttatgctgatagtttcatcctattacaaacttcagatttatcagtatcattattaactatattaattggtcatatattaatggcttttgtagtggagtttggtttccgttcttacttacaaaatattcttgaaacaagaatgaacacattttttgcgagtattgtcgttggtcttatttattcagtatttacagctaacacgacatatggtgtagaatacgccggataccatttcttatatacattcatgttttcaatgattattggtgaattaattagagctactaatggtcggtcaatttatattgcaactgcttttcacgcatccatgacttttgctctcgtctttttatttagtgaagaaacaggcgaccttttctcaatgaaagtcatcgcactttctacaacaattgtgggtgtttcatttattattattagtctaatcattcgtgctattgtttataaaacgacgaaacaaagtttagacgaagttgatcctaataattatttatctcatattcaagatgaagaaccaagtcaagaagacgcctcttcaacttcaaatcatgatgtatcatctaaagatgaaacaaagcaacaagatattgataatgacaaacatcaatcaaagaaacctaataagagtgacgatgcacttactacttctaattataaagaagacgcctcttcggttaataaagaaacggatacaactcacaatgataaccttaaagatcattcaacttataccgaagatagacactcatctgttgtcaatgatgttaaagatgaaattcacgaagttgaagatcataaagccgacacagataaatcacattaa

SEQ ID NO: 7081 - DNA, 180 bp, Staphylococcus epidermidis
ttgaaagttgttttatatttcatttactttgtcgttgcgttttttgttgtagattctttaattagtttggtatttccaattgaatttgatgtgtatacaaatttaattactgcattcatttttgcagtttttatgacaccactattatttgtattaaaacaagacaaaaacaaaaaataa

SEQ ID NO: 7082 - DNA, 174 bp, Staphylococcus epidermidis
atgaaatataaaacaactttcaaaatagaacctccttttaccctagctattttttcaaaaattattactaaaacactaagtaaacttttgcttaaaaaattagttaatgtcttacatcaattagataaattgatattaacgtttataacaaaattgaatttaaacaaaatataa

SEQ ID NO: 7083 - DNA, 693 bp, Staphylococcus epidermidis
atgaaagatgcaaaagagctaaaactgatgactttagaagatgtacttagtcaaattgaaaatggtatgacactcggaataggaacagggagcacaattgaattattaattccccaaattgctgaattaattcagcaaaagaattatacaattaccggcgtctgtacttctaataaaacagcatttttagctaaagaattagctatgaatatagttgatgtaaatgatgttgagaaaatcgacttagcaatagatggcgctgatgaagtagacagtgcgcttaaccttattaaaggcggtggtggagccttatttagggaaaaggtcatagatgaaatggctgaccgatttgtcgttgttgtagatgaaagtaaactcgtcaactatttaggagaaacatttgcattaccagttgaagtcgataaatttaattggtaccaagttgccaaaaaaattgagcgtacttatgatattcatgtaagcagaagagttaatgaagatgtaccgtttataagcgacaatggtaattacatattagattgttcattgcaaaatagaattcctgcttatgagctacacgaatttttaattcatttaactggcgttcttgaaacaggatatttcctcgatattgccgatcaagtaatagtaggaacacaagaaggcgtaaaaatattaaataaagaaacttag

SEQ ID NO: 7084 - DNA, 681 bp, Staphylococcus epidermidis
atgattaaagtgaatgccatatctattggcaaaatagaaacattgtcttatggaaactataaaccaatggaatcagcgttaaacaaaattccttttaaaggtcaaatgtggctcaatcgacttgggttcgtggacgatgaacaagcctatcataaccatggtggtatacataaagcgatatgttgttttagtaaatctaattatcaattatttaaagatgacttagatcaattacctgaatttgcaatgtttggagagaatttgacagttgaacatctagatgaagcagatgtttattttggtaatcagtatcaactaggcgatacaatcatagaagtatcagatatacgagaaccttgttggaaaattcaagctaaatatgcaatacctaatttagttcaaaaaatgtcgcaatctggtaaaactggattttattttagagttataaaagaaggatatgtacatcagagtgataatttaaaactcattaaaaaggcaaaatcaaacacacgtctatctgtgaaagacttaaatcacctattctataatgagcgaaataatttaagattaatctatcatgcacttcgaaatccttatctttcacctgatcgaaagaaaaaactacagaaaatgaaaacgcgtgccgaaaatagaaaattcattaaatctgacgataaatag

SEQ ID NO: 7085 - DNA, 1011 bp, Staphylococcus epidermidis
atgatatctaaagttgaacatcaaagacacggtttagatttaattaaaattgataatgacgatacgaaaattgtatttacaaactatggtgcaagaattgtttcttggaaataccatgataacaatatcgttttggggaatgtagtagaagcggatgaattttattttgaagaaccttttaattttggtgctacgataggtcgctatgcgggtagaatcgaaaatgcatcatttaaattagatgatgatacttttcaattagaatcaaatgatgatcaacatcatttgcatgggggcagtcatggattaaatagacgtatttttgattatgaaatagttgatgatattggacaagtaaagattatattcacaacaacgattaaagaagaagaggacaattatcctggagatatgatggtaaaggttattcacacttatgatgccaatcatcgatggtccgtacaatatgaggcaaaatcaacaaaaaaaacagtatttaatccttcaaatcatgtttattttaatttgaatcgtgataacaatgttgtctataaccactgtataaatagttcagcattaaaaatgtatatgttaaataataaacatattgttaaagaggggcaatctcttgatttacatcgattattggatacaaataaagtctatttaaaagatatttttgaaagtgacaatgaaactttgcaacaacaaattaatcattataatggcattgatcatccttttgaatttggtggaaatgagcttaccattgataattctgaatttgaacttaatattaagactgatatgcctcattttgtaatgtttacgtttaatgatccacaagtttggaacaatgattttaatatttataaggcgcattctggattttccatcgaaactcaatatatgcctaatgatataaatatgtacggcgccaaagctcagtctattttagaggcagatacattatttacatctaaaacaagttttcaaattcatgaaaagtag

SEQ ID NO: 7086 - DNA, 1611 bp, Staphylococcus epidermidis
atgagttatagtataggaattgattttggaaccgcttctggaagagtgatattagctgacacatccaacggatatatcatatcaagatatgaggaagactatgcgaacgaaacttatatgaactcattatatgataaaccgttacctgaaaactacttcttacaaaatgctgacgactatttacaaattcttgaacaaggcgttcaatttgtattagaagatagtaaagttaataaaaacgatgtggttggaattggagtcgactttacaagcagtacaattatctttctcgatgaacaatttgaaccgcttcatcgtcatgaagatttaaagacaaatccacacgcgtacgtaaaattatggaaacatcatggagctcaagatgaggcaaactatatgattcagatgagtaagaataaaaattggttagattattatggctcaagcgtaaatagcgaatggatgataccgaaaatcctggaagttaaacatgaagcaccagaaatacttagaagagcacggtatataatggaagctggagattacatcactagtataccaacaaattcaaatatacgatcaaattgtggtattggttttaaaggtttttgggacaatgaagctggatttaattacgacttcttccatagcgtggatcctgatttacctaaaatcgtcaaagaaaaatgtgaagcgccaatcatatcaattggagaaagtgcaggtcgtttatgtaaagactatcaacaaatatgggggctttctcaagatgtccaggtttcaccttttatcatagatgcacattctggcgtcttaggtgttggggcaatagaagctggagaattcactgcagtcattggtacaagtacttgtcatctcatgctagattcaagacaagtacccatttcttcaataactggctcagttaaaaatgctattatacctggattatatgcctatgaagctggtcaaccagctgtcggtgatttgtttgaatactcaaagaaccaagcacctaaacatattgtagatcaagcaaatgaacatcatatgcctgtgcttaactatttagaggaattagcaagtcacattagaatagaagaacaacatgttgttgttttagattggttgaatggaaatcgtagtatacttagtaatagtcatctaactggaagtatctttggtcttacacttcaaacaccgtatgaaatgattcatcgagcatatattgaagctacagcatttggaacaaaattaattatgaaacaatttgaagataatcatattcctgttcatacagtgtatgcgtctggtggtatcccacaaaagagtaaattactcgttgaaatttatgcaaatgttttaaataaaagggttgtcgtcataaattcatctaatgcttcagcattaggtgcagcgatgttaggtgcaaatgttgggaatgcatatagtacattaaaagaggcggcattatctatgaagcaacctatagcttatatacaagaacctgaaatccaaaaagttcaagcttataaaccactctaccataaatattgtgaactacatgatttattaggtcgtcaatatcctgaattatcatatttgatttaa

SEQ ID NO: 7087 - DNA, 474 bp, Staphylococcus epidermidis
atgttatggcatttaatttttatgattcctacaattattggttactcttttggaatgttctgtttaatatcaagtgaaacttttaaaagtaaaggatttctcttgttgggggtaggaatttttatcttttctttaatttatattttgatttatagtttagttacattaatacctaatgttgcgatattatcaagaagattccatgatcgctcaatgacgatgactcttccgattattttttatgttttcactgtcattgtatcaggttttaattatttaccaaatatagataattcagcggtattaatatttatgggaattatctgcttaatctactggattgggtcgatattaatattagtattgacttgcttagatagtaaaacagagtctaataaatatggaccaagtccaaagtacaatcgtaacgagacaaatttccatggtgataatgctaatccagttgataaataa

SEQ ID NO: 7088 - DNA, 609 bp, Staphylococcus epidermidis
ttggactttataaatcagcagacaacccaaactgcaaaagctttattaggtgttaaaattatttaccaagatgactatcaaacatatactggatatattgtagaaactgaagcttatttaggtatacaagataaagctgcacatggttttggtggcaaaataacaccaaaagtgacttctttatataaaaaaggtggcacgatatatgcacatgtgatgcatacgcacttattaatcaattttgttacacggactgagggcataccagaaggtgtacttattcgtgctattgaaccagatgaaggtatcggcgctatgaacgtcaatcgtggaaaatctggatacgagctcactaatggtccaggaaagtggactaaagctttcaatattccacgatcaattgatggctcaaccttaaatgactgcaaattatctatagataccaatcatcgcaaatatccaaaaactattatagaaagtggtcgtatcggtattcctaataaaggagaatggacaaataaaccactacgtttcactgttaaaggcaatccatatgtctctagaatgcgcaaatcagattttcaaaatcccgacgatacatggaaataa

SEQ ID NO: 7089 - DNA, 804 bp, Staphylococcus epidermidis
atgaaaaaaattgcagcgataatatttttaataggcttgtcactaattattatttgtagcgtgggagtttatgcacaaaataaaaaattgagtaaagacaatcaatataataatcaaacaacaaatttaatgaaaaactatgatgataatactgtgaaaagtatttacgttgatggaaaagtaagtgatataactgtgaaaaaaggtaaacatttttcggttaagtccaaagggaatgacaaaaatttaaacgtaactagcaaggtgaacaatcaacgttgggtaattacagagcgtcaaacaagtccacatattaattttagaatacaaggtaaagttagtaatcacattacgattacagtacctaaatatattaaaaacatagatattaaaactaatgccggggatttaaatattgttggagtaaatagtggcacaggaagatttgatgctgaatctggagacattaaagttcaaaaaggacgatataaaaaggtgacacttcataatgaggatggggatattcatacgaaagatattcattttaatcaagctaatattcaaaatgacaatggggatattcaaatgaaacaattagaccctgatattcctttacgtattaaaaatgaagaaggggatataaacttgaattataaaaaagaacttcatcacacccaaatcatcactcgtaatgaagaaggggaaacagacatcgatcatcgtgtgttatataatagtaaagttgaaaatggaaataataaagtgaaattaatcaatgaaaatggagatattaaagtaaaataa

SEQ ID NO: 7090 - DNA, 561 bp, Staphylococcus epidermidis
atgaataaaaatgattatttaaaagaacttaaaaagcatttgaaacatatgaataaagaagaaaaagaagatattttgaatgaatacgatacgcatttttatagcggacagcaagagggaaagtctgaatcagacgtgtgtaaagaattaggtaatccaaaattaataggtaaggaacttacagctacttccagtgtagaaaatgcacatcaaaaagtgtcgttaatgaatatttcatccgcaattgtagcagtaatggggctaagtttgcttaacttttttattgttataataccagcttttttatgcattttgctcgtattaaccttcatcatttttactctagcttcactagctgcaccattgatgttgctcattaaaggaattatggatggttttcattccattatcttatatgacgtatttatgactggtttaatgtttggtgttggactcgtacttgcagtggtgacttactatctcattaagtggctatttgatgtgactatgaaatatctaaaatggaatatctctattgtcaaaggaagtgtacaatcatga

SEQ ID NO: 7091 - DNA, 321 bp, Staphylococcus epidermidis
atgaatgtacagtttaagaaaggtgctttagaattaattgttctgctaattattaaaaaagaagatcagtatggttattcacttgtacaaaatatctccagatatatgaccatagctgaaggtacagtttatcctctgctaaggcgtttggttaaaagtggggaactgagtacgtattatcaaccttcaactgaaggtccgtctcgaaagtattatcaattaactcaacagggggctgcgagagttaatcaattagaggaggattggaaattgtttacggaagctgtagaacatttcattgaggagagtgagaatgaatga

SEQ ID NO: 7092 - DNA, 1209 bp, Staphylococcus epidermidis
atgatagaatttgatgcaattaccacattatgtttggcatgtgttttatatttaattggtcaaacaataatcaaccatgtttctattttaaggcgaatctgtattccagcacctgtcattggtggtcttttatttgcaatattagtggctatattagattcatttaatatcgttaaaataaaacttgattcggcgttcattcagaatttctttatgctcgctttctttactacaattggacttggcgcatcattaaaactattcaaaattggcggaaaagtcatgttgatttatttcactttttgtggaatcatggctatttgtcagaatattattggtgtatcactcgctaaactcttaaacattaaacctttattaggtcttacagcaggttcaatgtcaatggaaggtggtcacggtaatgctgcagcttatggtaaaaccttacaagatatgggtgtagattctgcagttgcagctgctttagcagccgctacactaggccttgtattcggtggactcattggcggtcccatcgttaaatatttaataaaacgctatgatcttaagccagagcatcgtgacgattcatttaaaaattatggtgtcgttgaatacaatcaatcattacatacaaaatataaacctattcaagtcttttttatacaattttctatactcgtattttgcatggcattaggaacatatattggcaatacttttaccgatttaaccggagttaatattccaatgtatgttggttcaatgtttgtagcagtaattattagaaatgctacagactttattggttgggatatcgttgatttaaaaatgagcgaacaaataggtgatatttcattaggcatctttttatcattagctttaatgagtatccaattaactcaaatatattctttagctatcccactaatcataattgttcttgtacaagtcgtatttatggtactattctcgattttcatattatttaaaggactcggtaaagattatgacgctgctgttatggtaggaggatttattggccatggtctgggagcaacaccaaatgcgatggctaatttagatgttatcactaaaaagtttggcaactcccctaaagcatatctagtagttcctattgttggtgctttcctcatcgacttaatcggtgtaattattgttatgagttttattcaacttttcagttaa

SEQ ID NO: 7093 - DNA, 1050 bp, Staphylococcus epidermidis
atgagtgactcacaaagagaacagaggaaaaatgaacatgtagaaatcgcaatgtcacaaaaagatgcgctggtttcagattttgataaagtgagatttgttcatcattccatccccagtattgatgttagtcaagtcgatatgacaagtcatactacgaaattcgatttggcatatccaatctatataaatgcaatgactggtggaagtgattggacaaaacaaattaatgaaaaattagcaattgttgctagagaaactggaattgcaatggcggtgggatcaacacatgcagctttgcgcaatcctaatatgattgaaacatttagcattgtgcgtaaaacaaatcccaaaggaacaattttcagcaatgtgggtgccgatgtaccagtggataaagctctacaagcggttgaattattagatgctcaagcgctacaaattcatgtgaactcacctcaagaattagtcatgcctgaagggaaccgtgaatttgcttcatggatgtcaaatattgaatctattgttaaacgcgttgatgttccagttattattaaagaagttggtttcggaatgagtaaagaaacattacaagcgttatatgatattggtgttaactatgttgatgtcagtgggcgcggtggaactaatttcgttgatattgaaaatgaaagacgttcgaataaagatatgaattatttatctcagtggggacaatctaccgtagaatccttacttgagagtactgaatttcaagatcgattaaatatttttgctagcggtggcttacgtacaccactcgatgctgtaaaatgtttagcattaggtgcaaaagcaatagggatgtctcgaccgtttttaaatcaagtagaacaatcaggtatcacaaataccgtagactatgtagagtcttttattcaacatatgaaaaaaattatgacgatgttagatgcgccgaacattgagcgtttacgacaagcagatatcgtaatgagcccggagttaatatcatggatcaatcaacgtggccttcatttaaatagaaaataa

SEQ ID NO: 7094 - DNA, 948 bp, Staphylococcus epidermidis
atgacggtgaccgttagatttcaatctttatcgcaacctcttacattagtttcaaatgtgaaagagattcctaaagatgcaacgattatatggtatgattttgaaaatgccactgatgaagaaaatgagtatttaaaaaatcattttgatttcaattacttagaaatagatgatgctatcaaaggtgacccacgagttaaatataaagaatatgacgcgtatcaatatatgatatttcatagtattattaatgatgattactcaccaatctcactaagtgtatttttagaaggtaatgttttagtgacataccatcacaaacattttccatcattaaagcgtgttgctcaacacaatgcagaaaatcatgatagtgaattagattgtgcagacatcgtcattcatattctggattgtatggtggataaatattttaactttgtttatggtattgaagataaagtgtataattttgaagctaagcatgtcgatgaccgctatagtaagagcgttatggaaaatgtctttcaattacgttcggatttaattaaaatcaaacgcgtattatttccgatgcaagaagttgtagatacaatgaaacaagaaggaaatataattaaagatgccaaacatagaatgtatattcaacatattgatgatcatcttattaaacaaagaagtgttattcggacttctcaagaaatgacgaatgagattcgtgaaaattatgaatcattcacctcatttaggatgaatagtataatgcagatacttacgcttgtatctgttatattctcaccactcacttttattgctggtgtatatggaatgaactttgaatttatgcctgagttgaaatggcattatgcttatttcgtgtgcttaactttaatgctaattataacaataatattaatcatattctttaaaaagaaaaaatggttttaa

SEQ ID NO: 7095 - DNA, 477 bp, Staphylococcus epidermidis
atgaacaaaacatttaccgtaacccgaactgtgacagaagaagctatagatgataataatcatatgcatgacgcgtattataatattatttttagcgaagtcattaataaattcaatgaggttcatggtttatcattaccagagagagaccgtctacaatatacagtttttactgttgaaacacatactacttttttacatgaattaacacttggtcaagaattcaatatagagttattcctttataattacgatgacaaacgaactcatttctttttgagaatgttaattgataatcaagaagttgttgcaaccaatgaggttatgatgttaggaatagataggacacaacgtcgtgctgcaccatttccaaaacattatctgaatgctatacaagattatgctcataagcaagaaaaaattgaatggccaccacaattaggccactcaattggaataccatataaaggagaataa

SEQ ID NO: 7096 - DNA, 390 bp, Staphylococcus epidermidis
atgtctataaaagaaaaattagtaatggagctcatgaatttaaaagacactgtaaaatacgaattgtcagaattaaatgaacaacaatatttgtttatgaatggcccagcacctcaattgatgaagcgtgccatgaaaatgagctatattctaggccaaaaagaagcgattgatcactttctattactcatcgacacttgccatgagaatgtcttactagataactgccaagactatcaaaaacaaattcaacataaacaattctctttacaagaagatattattcaccaaataaatcagtcaaaggaattcgaatcatttttatcaacttattatgtaaataaaggtaaacatgatatcaccagcaaaataaaaacattacttgaataa

SEQ ID NO: 7097 - DNA, 900 bp, Staphylococcus epidermidis
atgaaaaatagaatgatgaatcgcgtggttaataaatatatacttcataatagatcgatattttttagtaatgatgatgaagttaaacattttttagaaaagagaagtatcgaaaatagtaaaaaacatcagcaacctgcgacacttaatgtaaagtcaaatttagataaacttactcttaatgatatgcaagtgtttagatttaattttagacatgagaaaaatcaaaagatactctatctgcatggtggatataatactttgcaaccttctccatttcattggagacttttagataaactaactttaaatacattgcatgaggtcgttttacctatctatccaaagtcaccagattatcactacttagaaacgttcaaagcgattcgtgacgtttataatcaattagttgaagaagttggtgcgaacaacattgttatgatgggggatggttctggtggaggactagcattaagttttgttcaatcacttatcaatgataatcaagaagtgcctagaaagttatttttactttcaccgcttttagatgccactttgactaatcctaatattacgaaaacgttggaagaaaatgatatcttagttagtcgatttggtgttcatcaactcatgaaatcttggacgaatgatttacctttatcagacgcgcgtatatcaccattatacggtactctaaaagggttgccacctatatatatgtatggaggtggcagagaaatattaagcccagacatgcatgcatttactcatgctctagaggaatgtgggaacgatgttgagtttaaagagtatcctaaaatggtgcatgattttcctatctatcccatacgccaatctcacaaggtgttaaaacacatcactaaatcaatcttagagtaa

SEQ ID NO: 7098 - DNA, 633 bp, Staphylococcus epidermidis
atgtctgaaacattacaaaaccaaagacaattcaactctcaatttgaacatcaagagatccatcgtggaaaaagatatggtaaaaagaaacgctcatgggtaagtctcattattcaagttttcgttttagtattaactgctattactggctatagtatgcttaaacaacctatatttaaaatttcatttgtaaatgaaactataaatttccatcaattaagaaattttcaagatacagttacgcaaatcggtaatttaaatttaggtaatattgatcaattacaacagtctgtcgataatctcatcattatatttaatattttctttgtcctatgtctgattagtttgtttataaccgtaattacaattatttttaatcgcacagcactcaaagtagtcaatatattacttttagctattatgctagtcattacattgtatttcagttatatcatacatacaattgctcagaaaatttccgaatctctaaaacaatattatttaacagtatcacctgaacaagtattaactgaagcagatgcgattcacaatgcactgatactcattggatgtagtattgcgttattgattgtaagtttgtttttccgtaatcgtttaccacgtattaaataa

SEQ ID NO: 7099 - DNA, 1977 bp, Staphylococcus epidermidis
atgacagcgaccttcattattatatatattgtagtagcgctcatactcattggttttattaatttctttttaattaagcgtaaaagaaaaaataaagacaaaagagtggaacaacgttcgacaatagattctaagagagaaagcaatcaatctaaatttaaagcaagcgatttagaacaaacaactaagtcaaatactgatccaacgcaatcaaacgatattgaagatgaaaaacgaaaaaatcactttgactcagaaatagataatgcatctcaatttatcaatacagatagtaaagaggatagaaacgcgttaagccataagaaccaagaggaagatgacgcatcgaacgatgtgttgaaccctatcgatccaaattctactgaaggtagagttaatgaaagaattaaaaatcaagagtctaactttatttttggtaaaggtataactagaggtaaaattttagcggcaatgttatttggtatgtttatcgcgattctaaaccaaactctattaaatgtggcattgcctaaaataaatacagagtttaatatttctgcttcaactggtcaatggttaatgactggttttatgttagtgaacggtatattaatacctattagtgcctttttatttaataaatattcttatagaaaattatttattataggtttagcactatttacattaggttccttagtttgtgcaatctcatttaatttcccaattatgatgagtggacgtgtattacaagccataggcgcaggtatattgatgccgttaggttctaacgttattgttaccattttcccacctgaaaaacgcggtgtggcaatggggacaatgggtattgcaatgatattagcacctgcaatcggtccaacactttcaggttatattgtgcaaaattatgattggaatgtaatgttttacggtatgttctttataggtattattgctatcgtaattggtctattttggtttaagttgtatcaaagtacaacaaatccgaaagcagatattcctggaattatttatagtacgattggattcggttccttattatatggtttctcagaagctggtaataaaggatggggctcaactgagattgtaacaatgtttattgttggtacggttttcattattttctttattttaagagaactaagaatgaaagcgccaatgttgagcttggaagtattaaaatatccaacttatacacttacaactattatcaatatgattgtgatgatgagtttatacggaggaatgattttacttccattatatttacaaaatcttagaggattttcagcattagactctggattattactattgccaggtgcattagtcatgggagcattaggtccggtggcaggtaaattgttagatacaatcggtattaaaccattagcaatatttggtattggcattatgacatatgcgacatgggaattaagtaaattaaacatggatacaacatatctccatattatgtggatatatattgtgcgttcatttggtatggcatttgtaatgatgccgattataactgcaggtatgaacgctttaccaccacgtttaatttctcatggtaatgcgtttgttaatacaatgagacaattagctggttcaattggtacagctattttggttacggtcatgacgacacaacaaacaaatcatctttctgcttttggtgaagagttagataaaacgaatcctgtcattcaagaccatatgcgtgaacttgcccaacagtatggtggtgagtcagcagcaatgaaattattactcgaacatgtcaataaacttgcatctgtagaaggtgtaaatgatgcatttattgttgctacaattattagtgcgattgcactgatattaagcttgttcttacagggcaagaaaaaggctcaattatcagctgaaaaagcaaatgctgaagattatccttcgcaacaagataaataa

SEQ ID NO: 7100 - DNA, 648 bp, Staphylococcus epidermidis
atgaaaaaaatgatattaatcaatgtgattactatcattgtcctagttgttattggtgtgttaggcttttggttctggcataacacaacaagttatgtgacaactgacaatgcaaaagttgatggagatcaaataaaaatctcaagtcctgcatctggacaaattaaatctcttaatgttaagcaaggagacaaacttgataaaggtgataaagtagcagaagttttagcacaaggccaagatgggcaatcaaaagatatgaacatcaaaatgccacaaaaaggtactattgttaaaacagatggtatcgaaggttctatgactcaagcagggaacccaattgcatatgcatataatttagatgatctatatataactgctaatgtagatgaaaaagatatttctgacgtggaaaaaggcaacgacgttgatgtagatatcgacggtcaaaaagcatcaatcaaaggtaaggttgaagaagtaggccaagcaactgcagctagcttttcattgatgccttcatcaaatagcgacggtaactatacgaaagtttctcaggtagtacccgtaaaaatctctttagattctaatccatctaaaaatgttgtcccaggtatgaacgctgaagttaaaattcataaaaattaa

SEQ ID NO: 7101 - DNA, 552 bp, Staphylococcus epidermidis
atgaaacaacgtgcgaaatataaaataataaaaagtttaatcgaacttttagaatactatccttttgatgaaataaccattaaaatgatatgtgcatatagtggcgtgaatcgctctactttttatgatcattttcaagataaatatcaattactagataagatccaaaattatcatttaaacaaatatatatctttactacaatctttctataacgattttcatcatattaaaacagatcaaaaaaaattatataaatttttcttattgatagccaaatatattaaacgtaaagaagcgttctacagagcaacacttgtaacatatcctaataaagatattgcattagattacattaacgccactaaaacatgttatgaaaaagtcatggatagatatgaaacttcaataaataataaacgtatgtttatcatttattcagtcggtggtcaagcaggtgtatttatcgattggttacgtaatggatgcctcgaatctcctcaagaggtcgctcaagttcttttagctaatacaattaaattacaacgataa

SEQ ID NO: 7102 - DNA, 1212 bp, Staphylococcus epidermidis
ttgaaaagggtgtatcagtcagaaaatcaatcattactttttattgttattttaggttcattaacagcatttggcccattggctattgatatgtttttacctggactacctaatattagtcatgattttgatatttctgcatctacaactcagcttactatctccttttttatgattggattagcgttaggaaattttttagctggccccatatctgatattactggtagaaaaaaaccattaattttctcactgattatttttactattgcgagtttaggtattatattcgtcacaaatatatgggttatgattattttacgatttattcaaggattaactggtggtgcaggtgcagtcatctcaagagccattgctagtgatatgtactcaggtaatgcgctaactaaatttttatcattattaatgcttgtcaatggcattgcgccaattatcgcacctgcgcttggcggtatcattttaaattatgggccatggcgaattgtatttgtaatactaacaatgtttgggattgtcatgttaataggaactttatttaaagttcctgagtcgcttgaaaagagcctaagggaaagtagtaacataggtacgatgctaattaatttcaaagaactttttaaaacaccccgttttgtattacccatgttgatacaaggggtgtcatttgtattactatttacttatatttctgcatcgccttttatagttcaaacaatttatggtttaacgccattaaacttcagtattatgtttgcttttataggcgttacactcattatttcaagccaattaaccggaaaacttgttgactatatagatagattactgttgctgagaatcatgtctactatacaagttattggtgttataatcgtatcactaactttactcaaccattggactttttggatactttcttgtggctttgttattttagtggcaccagttacagggattgcaacgttaggattttcgatagcaatggatgagagtaaaggggccaaaggtagttcttcaagtttgttgggattgtttcaaactttacttggtggcgtcatctctccacttgttggcattaagggagacagtaatgcggtaccttatataatcgttatcgttattacagcaataattcttatgattttacagttgattaatgtgaagatatttaaaaaagctaaaattcattga

SEQ ID NO: 7103 - DNA, 1389 bp, Staphylococcus epidermidis
atgagtcaatgcccaaattgtggtcatcaaatgaaagatgatacatcgcaatgtccaaactgtgggcaactattaacaaagaagaaaaaaagaaagattaaagaccaatcatctcaatcgagtaatgagaattctaccaatatacgtcttcgtaaaattgtgccgataggtattagtgtatttatcttaatacttattatcgtgttatttttccttttaagaaattataattcgcctaatgcacaagctaagatattagttagtgctgtagataataatgattcacaaaaagttgctacattattgagtactaaaaataaaaaagtagacgatgctgaagcgcaacaatatattaattatgtaaaaaaagaagtaggtattaagaagtatattcgagatatcaataatactgtagataaattgaataaaagtaattcaagcgtggcatcttatatacaaacgaaaagtggacaagatgtacttaagataagtaaaaatggtacaaagtatttaatttttgataatatgagtttcacagctccgactaaaaagccaattattaaacctaaagtagaaactaaatatgaatttagaacaagtggaaaaaagaaaactgtcattgctgaagcaaataaaaatacacctttgggtgaatttattcctggtacatatcatttaccagctaagaaaattacagaaaacggtacattcaatggacatttaaatttcgactttagagaaagccactctgaaaccgtagatgtagctgaagattatgatcaatcatttatcaatatcaaatttaagggtgcgagtaaattaagtgataaatcagaaaaagttcaaatcaatgaccgtacattcacttattctcattctaaagaatttggtccttatccaaaaacaaaagatataacgatttctgcaactggtaaggcaaaaggtaagacgtttagttctgagacgaaaacaattagtgcagacgatttgaaagataatacgaaagttacattggaatttgatagtgataaaataaatagctatgttgagaagaaagaaaaagaagaaaatagtttgaaaaataaattaactgaattttttactggttatgcaacggctatgaattcagcatttaatatgaatgattttaactttatatcgagttattttaaaaagaattcgtctatatacacatcgatgaaaagtaatttccaaaatcgaacgaacgtgactatgatatctccacaagtgttaagtgttcaacgaagcggacatactgtaagaacaactattcaacatatcgatcatattggtaattatataaataaagattatgaattagaaatagataatgatgatagtaatatgcagttggttaaagaattataa

SEQ ID NO: 7104 - DNA, 456 bp, Staphylococcus epidermidis
atggtaagaagaatagaagatcacatctcatttttagaaaaatttattaatgatgttaatacattaacggcaaagttacttaaagacttgcaaactgagtatggcatatcagctgagcaatctcatgtgttaaatatgcttagtatagaggcgttaactgtggggcaaattacagagaaacaaggtgttaataaagctgcagttagtcgaagagtcaaaaagttgctcaatgctgaattagttaaattagaaaaaactgattccaatacagaccaacgtcttaaaataattaaattatctaataaaggaaaaaaatatattaaagagagaaaagcgattatgagtcatattgctagtgatatgacgagtgactttgaaagtaaagaaattgaaaaagtaagacaggttttggaaattatcgaccaccgtatacaatcttatacttctaaactttga

SEQ ID NO: 7105 - DNA, 825 bp, Staphylococcus epidermidis
atggtaactgtatcaataccatatgatatgtttatcattgtaattgtagcaatgatactgtttttgattaaacatcgttttattttcaagttgcaaacaggacgtttttttattttacaacttagtcatcatttttatactgtggggttatttgctgtgagttgtttatatataagtactattcccctaattatcattaatagcttagctttatgggccgctaccattgcatttagtacaatttattcatttatcggatacttatcttggtctacagcttttgaaaatcatcaatattataaacacgtaaagttaattatggtgcttggagctggaattttctctgaagaagtgactacgcttcttgctgcaagacttgataaagctttatctgtttatcattcacaacggactaaacctatcatcattgtaagtggtggccaaggtcctgacgaaccaatttcagaagcacttgcgatgaaaagataccttatagctcacaacgttccggaaaaccatatatttatggagaatcaatccacgaatacacgaaccaatttcttatactctaaatctatcattcattcgatgatgcctacttcaagtcatatgttgtgtgtaacaagtcaatttcatgttttaagagcgcttaaatttgctaaaaaagctcatctttctttcgatggtattggaagtcgtacaccataccactttttggcacaatctatgattatagactttttgggtttaatgtatcaatataaaacaatacttactatttatttcgctatattgttttggcttgcaatactacaaaccatataa

SEQ ID NO: 7106 - DNA, 669 bp, Staphylococcus epidermidis
atgggtttagttgttaaagatataagtaaaacttttggagaaaaaacctcaaaaacagaggtgttaaaagatattaactttgaagtgaaagatggagaattcatcattttaaatggtgcttcaggatcaggaaaaacaaccttattaactattttaggtggtttgttatctcaaacatcaggtgatgtagtatacgaggggaaatccttatttgaacgacatactaataaagcgcacttaagactaaatgatattggttttatctttcaagcctctcatttagttccatacttaaaagttttagaccaacttaccttaataggtaaagaaactggaatgtctagcaaagaagctcaagcaagagctaaagaattattaacaaaaattggattagaagagcaacttaatagctacccacatatgctttcaggtggacaacaacaacgtgtagcgattatgagagcacttatgaatcatccgaaaattgttttagcagatgaacccacagcaagtcttgatgctagtcgtgctcaagaggttgttgaaatgatcagaaaacaaataaaagctaaccaaatgataggtatcatgattactcatgatgaaagcttattcaaatacgctgatcggattgttcaattgtacgatggtaaaataaaaaacagttaa

SEQ ID NO: 7107 - DNA, 1053 bp, Staphylococcus epidermidis
atgaatctagcttggaaagagattaaattttataagttcagatttatattaatcatgttcattatttttctaatggcgattatggttttatttatcagtggacttgctcaaggcctagcacgagaaaatatatcaatatttgatcaaattaaaggtaatcaatttgttgttcaaaaaatgaaagaaccacaattagaaaaatctattctatcacgaagtaaacaagacaatatttcaaaaattattgatgaaaaaccttttaaaatggcaggtaaaactttcaaaatcaatggaaacgaagaaaacgtgatggctataaatagcgtgaaaaatcatcagccaaatttgaaatctggtcattatcctaaaaatggaaatcagatagcaataaatgaaaaactaactgcagaagggctttatttagacgataaagttaaagtcaaaggtgacgatacaacttataaagttgtaggtatattaaaaaacacgatgtattctcatagtaacattgttatgatggaccaatccaaaatagaacaaagtagtaatgtcgcaacattttatgttacgaatcaattatctaaatcgaataaaaataaaataaatcacatcaaaggcgttcaaacagcaactacaggcgatataacaagtaatatcgcaagttataaagcagagcaaacaccattggatatgatgattattagtttatatattataactgcaattgtattgagtgcattcttttatgtaatgacgatacaaaagacatctgaaatcggtattttaaaagcaattggtataactacaaagcatttattgacatcgttgattttacaaatttcaatgattacatttataggtgtagctatagcagaagtagtcatttttctcatcagtcaaattttaccagtttcaatgccattccatatagatatgcataatataatcattgtacttgtcatatttatgatagttggattaatcggtacatcattatcatttattaagttaattaaaattgatcctattgaagctattggaggtggccaataa

SEQ ID NO: 7108 - DNA, 675 bp, Staphylococcus epidermidis
atgattaattgcttaatcgtagacgatgataaaaagttattgcaatatgtttcaagtcatttagaaagagaaagtattcaaacacatacttttacaagtggagaagcatcactagattttcttgaaaataaaaatgttgatattgcgatagtagatattatgatgagtggaatggatggttttgagctttgtcaaactttgaaagatgactatcatattcctgtcataatgttaacagctagagatgcattaagtgataaagaacgtgcatttctaagtgggactgacgattatgtcactaaaccttttgaggttaaagaattattatttagaattaaagctgtcttaagacgatatcaaattaatgctgataacgagttacaacttggcaacttaatattaaatcagtcttatatggaaattactgtgggttcaaaaacgatgaatcttccaaacaaagaatttcagttgttatttttattagcctctaatcctaaacatattttcactcgagatgatattattgaaaaaatttggggcttcgattatgaaggagatgatcgtactgttgatgttcatattaaaagattacgtcaacgtttatctaaattgaaatcatcagtatcaattcaaactgtaagaggtcaaggatatagggtggaccaaaatgtttaa

SEQ ID NO: 7109 - DNA, 1356 bp, Staphylococcus epidermidis
atgtttaaaacattatattcgagaattgctatatatgcaattacagtcattttgtttagtgcattaatgagttttctttttacgaatatttattatcactttcatttgaaagcttctaatgatgcaaaaattatgcgcacacttaaagaagctcgtgaatatgaaagaacacaaaaacctaaacctctagatacgtatttgaaacatttaggtcaaatgaattatcaaattatgactgtcaacgaacatggaaccaaacatttttatggggaaacttttcgtaaaaatactataagtcagtctgcaatcaaaaaagtgctcaacggtgaagattatcatggtattaaaaataaaccttatgcattttttgtaacagggttcttcgataatgaaacggataatacagtaggtattcaatttaaaacagatgatggggcattagcagtttttatgcgtccagatatcggggaaacttttagcgaatttagaattttcttagctgtgttgataacacttttacttattatttcaatttcactagtcattgcatcaacatattctattattaaaccagtgaccgcattaaaaaatgcaacaactcgaattatgaaaggtgatttcagtacgcctatcaaacaaacacgtcacgatgaaatcggaacactgcaatcacgtttcaatacaatgcgtcaaaatttaggacaagtagatcaaatgagacaacattttgtccaaaatgtatctcatgaaataaaaacaccgcttacacatttacaacgattgcttacacaacttgaattgacgcaaaatgaagaagagaaacaactatgtatcaatgaaatgtttgaaatcactaatcaagtaagtgaactaactaaggaattgctacttttatctgaattagataatgcttcccaccttacttttaacgataatgttcatttaaatactttaataaaggatattattagacatgaacaatttcgaactgatgaaaaagatttagttatgtttactgaattagaagatttgtatttccgaggaaatgaaagactattacatcaagctttcaataacctcatcattaatgcaatgaaatatgctcctcaaaatagcatgattaatatcactctaactagtacaaatcacttgattatatttaatattgaaaatgatggatcgattgcagaagaagatgcgaaacatatcttcgatcgtttttataaactgagtgacgaatctagtagtaatggtctaggtctagccattacccaatcaatcattcatcttcatcatggtaacattactctcacttctgatgataaaacacaatttattgtaaaactatttatttag

SEQ ID NO: 7110 - DNA, 1479 bp, Staphylococcus epidermidis
atgaatactcaacatagcaaaacagatgtcatcttaataggtggcggaattatgagcgcaacattaggaactttactaaaagaattaacaccagaaaaagatatccaattgttcgaaagattgagtcaacctggcgaagaaagttcaaatgtttggaataatgcgggaacaggtcattcagcattgtgtgaattgaactatacgaaagaaggcaaagatggttcagtagatattactaaagcaattcatatcaacgagcaatttcaattatctaaacagttttgggcttatttaatacgtgaaggtcatattgaaagtccagataaatttattcaatcagtgccacatatgagctttgttaaaggggaagaaaatgttgaatttttaaaaagtcgagtggcgagtttacagaaaaatgtattatttgaaaaaatgaaaatttctcaagatccagaaaaaattaactcatgggctcctttaatgatggaaggacgccaatcagatgaagcaattgccatcacgtatgacgagacaggtacagatgttaactttggtgctttgactaaaaagttaatagctaatttacaacaaaaaaatgttggcattaattataaacatgaagttttagatataaaaaaattaaataatggtaactggcaagttgtggttaaagatttaaatacatcaaatgtaatgaattatgaatctaagttcgtcttcatcggagctggtggtgcaagtttacctttattacaaaaaacaaagattaaggaatctaaacacattggtggtttcccagtaagtggcttatttttacgatgtaaaaatccagatgtcatacatagacatcatgcaaaagtctacggtaaagccgaggttggtgcacctccaatgtcagttccacatttagatacacgatttgttaatggtgaaaaatcattactatttggaccttttgcagggttttcgccaaaattcttaaaaaacggttcatatttagatttagttaaatctgtgaaacccaataatatgattacaatgttaagtgctggcgtaaaagaatttaatttgacgaaatatttagtttctcaattaatgctttcaaatgaagaacggatcaatgatttgcgtgtattcttaccagaagcgaaagatgaagattgggaagtaattactgcaggtcaacgtgttcaagtaattaaagatacagataagtctaaaggtcaattacaatttggtacggaagtgataacatcagaagatggttcacttgctgcattattaggtgcttcacctggtgcttcgactgctgttgatatcatgtttgatgtcttgcaacgttgttacaaatcagagtttaagtcatgggaaccaaaaattaaagaaatggttccatcatttggtttaaaattgtcagagcatgaagatatgtaccattcaataaacgaagaagtaaaaaaatacttgaatgtaaagtag

SEQ ID NO: 7111 - DNA, 1146 bp, Staphylococcus epidermidis
atgaagtcgttcacattttttatgcataatatttatgcaatgggcggaacggtaaagtcggtgacacaacttgcaaatacacttgcagaaaaaggacatcctgtaacaattatttcagtttttagaggcacagactctccatattttgaattacattctgcaataaaagttaaagtcttagtggattatcgcttaaagattaaaaatactagagctattacagcaaatcgtatcaaaaagtataccccctttttaaatacaaaagtgatttctcaatttgagccaggtaaaagtcagttttcgagttatgtagagaaaaaaatgattaaagcaatcaggcatactaaaactgatatactcgttggaacaagagctagctttaatattctcatttctaaatatgctaaagctgaaatagtgaccatcgcaatggaacatatgaattttgatgctcaccctgatcagtatcaaaaggaaattattgctgcgtaccgtaatatcaataagattacaacgttaactgtcgcagaccagcaaaaatatcaatcacaacttaaaactcctgtatacgttatacctaatatggttaccgaaaaaagaattgctgctccaaagaaaaatcgtattattagcgccggacgtttagaatatgaaaaagggtatgatttattattagagagtattcgtttaatacaagaagacttgcgtcaattgaattatgacgttcacatctatggttctggtagtaagaaaacatcacttgttgactttattaatcaatatcatttaaatgatttgattaaaatatatgagccaacgcaagaattaaataataaacttgcacaaagtaaaatcgttgttgtaccttcacgcaatgaaggtttcggaatgattattttagaggcaatggtgcaagataatatagtaataagttttgaaggcaatgtagggccagattcaatcattaacaacggagataatggttatttagtaaactatgaaaatgtgtctgaacttgcaaaacgtatcgatttaacaacacaacattataatgagttagatcacatcattgaaaatagtaaagatacgttgaaacaatttagtccagatcatatatatcaattatttatgtctatgtttaaataa

SEQ ID NO: 7112 - DNA, 1602 bp, Staphylococcus epidermidis
atgttagtagaatcttttaatccatttggtaatttactattatcatctttaattgcggcaatccctatcattttatttttactgtgtcttacagtatttaaaatgaaaggaatttatgctgctatcacaacccttgtggttacattattaattgcaattccattctttaaattaccagtaggaattgcctctggagcagttgttgaaggtttcttccaaggtatcttcccaatcggatatattgttattatggcagtattattatataagattactttgaaatcggggcaattcgcaactattcaagacagtattacaagtatttcacaagaccaaagaattcagcttcttttaattggtttttcatttaatgcattcttagaaggcgctgcaggatttggtgttccaattgcaatttgtgcacttttattagcgcaacttggctttagaccattacaagcagctatgttatgtttagtagctaacgctgcatctggtgcattcggtgcaattggtattccggttggtgttgtagatacacttaacttacctggtcatgtagaagcgatgggagtttcacaaacatcaacattaactttagcaattattaacttctttattcctttcttacttatctttatcgtagatggtttcaaaggaattaaagaaactttaccttcaattcttgttgtttctgtcacttatacagttttacaaggattacttacagtgtttaatggtccagaattagctgatatcattccatcacttgcttctatgttagcattagctttattctctaagaaattccaacctaagaatatctttagagttcaaaaagatgttaaaccagaagcaccgaaaaaacttaaaggtaaagaagtcttatttgcttggagtccattcattatcttaactgtcattgttatgatttggagtgcaccttcatttaaagcattatttgcaccaaaaggtaaattatctgctttagttgctaactttgacttacctggtactttcagtaatatttcacacaaaccaattactttatcattaaacttaattggtcaaacaggtacagcaatactaattacaattattattactgttttaatggctaaaaaagttaactttggtgatgctggtcgtttatttgttgaagcatttaaagaattatggttaccaatcataacaatttgtttcatcttagcaatttcaaaaatcacaacatatggtggtttaagtaatgctatgggacaaggcatctcaaaagcaggaagcgtattcccaatattatcaccaatccttggttggatcggcgtatttatgactggttcagttgttaataacaactctttattcgcgccaattcaagcttctgtagcacaacaaattggtacaagtggttcactacttgtagcttcaaatacagcaggtggggttgcggcgaaacttatttctccacaatctattgccattgcaacagcagctgttaaagaagtaggtaaagaatctgaactacttaaaatgacattacgttatagtattggattacttgtatttatctgtatctggacatttatcttgtcattcattctgtaa

SEQ ID NO: 7113 - DNA, 1680 bp, Staphylococcus epidermidis
atgataaagcaaataaatatttcaaatatggacaaattaaaagagcaaatggaacgtgcacttagcgacggctatacgcatgtcatcccctattcaaatgaaattcaaattcatcagtccatgattaaagctatcactttacctaagacttcatttatagttgactatacaattaacaattattatttaaatgattgtaaatacttcgggttggactttgttgattttgaggactgggttaaaaatattaatttatatccaaatgttatttatgaaattaattcaacattagaacttattgataaatttgaagttgaaaatatctttgatttagcattattaacaattcttaaagggcatatcgcagttgaaggtcatgtcgtattagactttaaaggaccattaaaaacgagcaagggattttggcgctcatttgaccgtaatgatttaacttatagagataaattcttcttaaacaccatcgcttatgcacataaacaaagaatcccatttactcgtgtaccatttaacgatcacgatagtattagatattatgattcagtactacttagtactaaatttaaagctccaagatggttagtgactcctattaagaattattcagttaaaaaacacaaagagattagctatatttataaaaaggattcatcaaaacttaagaaccacgtcgtttttctaggatttgatttcggctatcgaggaaactctaagtatttatttaattactttgttaaacacaatcctatgatagagtcttactttataacagatgagagaacaggaccacattttatttcaactaacgatgaaaatgtgaagaatttgattgaaacagctacttttgtcattacggaaagctatattcctgacgacattcaccctaatggtaaaatcattcaattatggcatgggacacctattaaaaaactatttttagatagtaaagagccacaccaaaatttaaatatatataactaccgagctcgaaaatataataaatggacacaacaagattatttaattgtggattcagaagaatcaaaaacatactttgaatcagcgtttcctagtcaaaaaattgatatattacctgtaggatatcctagaaataattatttattaaatcgtatcaatgatgtaggtttacataaacgtatatttagtgagataaatatagatcctactaagcgagtattattatatgccccaacatggaaaacaaattcatctgatgatgatatatttcctattaatgaacagttattaaaacattataatgtgatctataaaggacacgtcgagagtaaaaatgacttggttcctgaaggcgtaataaatccgcctaataatattgaaacgcaagacttaattattatttcagatgttgttttaacagactactcatcaattatttttgatgctttaaccgtagataaaaaaggatgcttatacacacccaatcactctcaatatgttgaagaacgtggcgtctatcaagacgtaatggacaccttaaaacctatttggtataccgatgctgaactattaataaatgatttaattactgatagcatcccacaattaaacaataagtatacaaataaaaataatcagtcatttgaatatattagtaaacttatttcaaatcaattgaaataa

SEQ ID NO: 7114 - DNA, 648 bp, Staphylococcus epidermidis
atgaaaaaagtattagcaagtgcaacgattttatcattaatgttagtaggttgttccaatggtggaaatgatgaatcaagtcataaagatgatagttctaaaacagaacaaaaggataaatcatcatctcaacatgactcaaaaaaagattcgaaacgtaatgatacaaataataagcaagacaatcaggaaaataacaataataaagaacaaacaagtaatcaaaatccaattgctggagaacaacgaacaagcgaaagaccaacaacaaattcaaacggaaattcatcggataatcaaaataaacaacagcaatcagtacaagataaccagaataaatatgtagcaccataccaaagtgaaaatgcgacacgtgttgctcgatatctttctccatttgagggcgaccgcagtcaagctttgcaacaattaccaaattttgaaactgcactttccattgctaaaaacgaagctaatatgtatggaagcgaaaataaatcatataatgattattcaatagaacaaacagaagatggatttagatatgtgtttagctttaaagatccatcaaaaagtaatacttactcaattgtaacgcttaatcgacaaggtcaacctactgttgtagatcctaacttccaaccttag

SEQ ID NO: 7115 - DNA, 2166 bp, Staphylococcus epidermidis
atgaataaactgacaattattgtcacgtattataatgcggaggaatacatcacaggttgcttagagagtattaagcaacaacgtacacaagattttaatttgattattgtgaatgatgggtcgacagaccaaagtaaaaaattaatggatgaagctattaaagactatgataaaaacattcgatttatcgatttagatgaaaatagtggtcatgcacatgcgcgtaatattgcattagaagaagtggaaacaccttactttatgtttttagatgcagatgatgaattagcttcttatgcaatcacgttttacttagaaaagtttaataatactgatggtttaattgctccaatacattcttttactacacaacgtccgcaatttgttgatttagatcgagtaagggttgaatactttaatgccaaagggaatattaattcatttttaagaaaacagtcagcttgtaacattatttttagaacagctattgtcagggcgcatcatattcgatttaatgaaaatttaaatacatatgtggattggtcatttgttcttgaatatatgaagtatgtaaataagtttgtacgtatttttaacttcccattttatttccgtggggaagtctatgatccatttgaaacacttacattaagtgaacaaaattttgatattttatttaaagattacgtcaacagcttttatgatgccattaaacgagcaacaaatccaaaagttagagaatttattgtcactaaaatgggaaataaaattgctaatgaatttgaaccaactcgatatgatattaatgaacgctatcaaacacataaggatacgcttgttgaattatcgaaatttttacatgtacatttagttaaaaaccaaaagctaataaataaaattgaaacaattttgttaatgaataatgaaactgataaagcttttaaagttaatcaatttagaaaaacgttgcgacatgttaaaaatattgttctaagaagaaaaaataaagaacgttcattgtatgatttaacagataaagaagataatgttaaaccgaaaacgattgtctttgaatcgttcggtggtaagaattacagtgatagtccaaagtatatttatgaatatatgcaaaagtattatcctaattatcgctatatatggtcatttaagaatcccgataaaaatgtcgtaccgggtagtgctgaaaaggttaagcgtaattcagcagagtattatcaagcatactcggaagcaagtcattgggtatcaaatgcgcgtacaccactttatttaaataaaaaagaaaatcaaacgtacattcaaacttggcacggtacaccattaaaacgtttagcgaatgatatgaaagtggttcgtatgccgggcactacgacaccaaagtataagcgtaattttaatcgtgaaacatcacgttgggattatttaatttcgccaaatagatattcaactgaaatatttagaagtgctttttggatggatgaagaaagaatattagagataggttatcctagaaatgatgtattagttaatagagccaatgatcaagagtatttagatgaaattagaactcacttaaatttatctagtgataaaaaggttattatgtatgctccgacatggagagacgatgaatttgtgagtaaaggaaaatatttgtttgaattaaaaattgatttagacaacctttataaagaactcggagatgattatgtgattttattacgcatgcattatctcatttctaacgcacttgatttatctggttatgaaaattttgcaattgatgtttcaaactataatgacgtctctgaattatttttaataagtgattgtttaattacagactattcatcagtaatgtttgattatggtattttaaaacgccctcaatttttctttgcatatgatatagacaaatatgataagggattacgaggattctatatgaattatatggaagatttaccaggacctatttatacagaaccatatggcctagctaaagaactaaagaatttagataaagtgcaacagcaatatcaagaaaaaatagatgcattttatgatagattttgctctgtagataatggtaaggcgtctcaatatattggggatttaattcataaggatatcaaggagcaatga

SEQ ID NO: 7116 - DNA, 540 bp, Staphylococcus epidermidis
atgggggaaaggataagaagtgttcaaataactgaggtagagcaactacaactaattgctaaaagaacattttttacaacgtttagagaatcttatagtgatgaggacttcaagcaattttttagtgatgcatataatatagatgtgttgagaaaagaattggaacaaagtaattcttttcattatttttatgaagttgatcaaaatatagtaggtttcctgaaattgaacattaatgatgctcagactgaaaacaaaggtcatgcatatttggaaatacaacgcatttactttgatgaagcatttcaagggagtggaagaggacaattatttatcaatctagctattgatcaagctatcaaatttgggaaatcgaaaatatggcttggtgtttgggagcataatcctaaagcgcttagcttttataaaaacaggggatttagagttacagggtcgcatcaattttatactggaagtgtagtagataatgatttgattatggagttggatcttacaacaaactataaacaaagtttatag

SEQ ID NO: 7117 - DNA, 993 bp, Staphylococcus epidermidis
atggtagaaaaattcaaagcttttgtagtcgatcaagatgacgacggtattgtttcaaatagttataaagaactaactaaagatgacttacctgagggtgacgttttaataaaagtacattattctggcataaattataaagacgcactagccactcaggaccataacaaaatagtaaaacaatatccgatggtccctggtatagatttagcaggtaccattgaagaaacaaatgctccaggctttgaggttggagataaagtcatcgtaacaagctatgatttaggtgtaagtcattacggaggcttcagtgaatacgcacgtgttaaatcagaatgggtgattgaattacctgaagatttaacattggaagaagctatgatttacggtactgctggctatacagcaggtttagctatagaacaacttgaaaaatcaggtatgtctattgaaggtaaagaagtgcttgtacgaggtgccactggaggcgtcggaacgatttcattactcatgttaaataacttagggtatgatgttattgcaagtacaggtagagatgacgccgaagaaaaacttaaaaagcttggtgctaaagaagtaattggccgtttaccagaagataatagtaaaccattagaaaagagaacatggcaggcagccattgatccagttggtggtgaaaacttaccgtacatcgtcaaacgattggataacaacggaattgttgcattaattggcatgactggtggtaacaattttgaaacaaccgtctttcctttcattttaagaggagcaagtataattggtatcgattcagtatttactccaattaaactaagaaaacgtgtttggagaagacttgcaaaagacttaaaaccacaacaattacatgacatcaaacatgttatttcattcgatgaaatcccaaaagcaatcgatcaagtcatcaatcataataatactggacgtattgtcattgatttcaatgtttaa

SEQ ID NO: 7118 - DNA, 402 bp, Staphylococcus epidermidis
atgactaagattcactttgaagcacccagtcccgaagattactgtaatttaagagctaatgctggaatgagtagtaaatcgattgaagcggcaataaaggggcttcctcatgcatgttttaatgtgaccctttatgagaatgatatgttgattggtatggggcgagtgattggggatggtggtacagttttccaaatcgtcgatattgctgtgaaagatatatatcaaggtttgggtcatggaatgacaattatgcatgaaataatgaagtatattgagagtgttgctgaagaaggtacatatgtaagcttgatagcagattatccggcagatcaattatacgagaagtttggatttaaaagtactgagccttattcaaaaggtatgtatatcaaatattaa

SEQ ID NO: 7119 - DNA, 417 bp, Staphylococcus epidermidis
atgcgtagattattatactcttttttattttatatggtcataggtttattaagtggcttttactacagagaattaactaaagcgcatgactttgtgggtgacacgcaattgtctttagtgcatacacatacacttatcttaggcatgtttatgtttttactcttattaccacttgaaaaagtatttaaattaagtagttattacttatttaattggttctttttcgtgtatcatttaggtgtgttaatcacgatttcaatgatgacagttaaaggtacattccaagttattggtaaaaaattttcacccgaaatgtttgcgggatttgcaggcataggtcatacaggtatgcttgcaggtttactgttactgtttttcttattaagacaggctattcttacagaacccaaaaaataa

SEQ ID NO: 7120 - DNA, 264 bp, Staphylococcus epidermidis
gtggctaatcctaaaaaggaagacacattcaaatggaacgctactcaaacttatgttaatggagatgttgttaagtggactgggaaggaagatagtgcgcaccctgcaccaactacaactgtaaaaaaaggtgcaaatccaaatgacactcattctgactcgagtcaaggtgattcaatcgttttatggatagttgctatcgtagcaattgtgatttcgttgattgctctttttaaacaagcgcatccaaaaaaatttaattga

SEQ ID NO: 7121 - DNA, 270 bp, Staphylococcus epidermidis
atgttacgcaaattactgttgttaacttttatagtattttgggggatcggattttttaagtatgctgatgcacatgtcacacttaatcctaatgaaagtgaacctgaatcatatgataagtatgatgtaagggtgcctgttgagcaaaatgatcatacaatgaaagtagaattagatgtgccaaagggattaaacgttgagagtgttaaacctattgaaggttttaaacatcattttttaaagataaaaaagggaacattactaaaataa

SEQ ID NO: 7122 - DNA, 1047 bp, Staphylococcus epidermidis
gtgaccttatttgatgataaaggtaaaaagattaaagaccttaaaccaataacaactggatggtctcagacagttgtattttcatctgagcaaattgttaatggcacgaatactattgaatggcatacggtatctgcggatggacatgaagtcggagatacgtttgaattttcagttggaaaagtgacggctaaagatgtagatacatcttcacctttttatgaacagtctaaattttggtttggattattaagatatgttactgaaggtgcaacctttctacttattggcttgttttggttaaatggtattgctaagaaacgaggattaagacaatttaatgtgttacccaagcaatcaggaattgcatggattatggctatgtcagtactcgtgagtcttgtggtttatatgatgacactcacatctgatatattagaagatattctatcatttaaattagaagtgataatgcaatttccgtatatattaagctctatttcactaatcattttgtttatacttttcattttaaaggatatggaaaaaatatggtactggctcatttcaatagttatgattgctgtggtaagtatgtctggacacgtgtggtcacaacaagtgccattatggtcaattatcataagaacaattcatcttatagggctaacgttatggttaggttcactcgtttatctcatttgttatgctattaaagtgaaaattaatcagttgacgagtgtaagacgtatgcttttaaaagttaatatcattgctgtgattatgctcgtttttacagggattttaatggctattgatgaaacgaatactttaacactttggaataatgtgagcgcttggtctatttatcttgtcataaaaattgcaggaattattactatgatgctattaggtttctatcaaacgatgcgtgctttgagacaacgacaacaggtccatcgttttgcactgatgactgaattgttaattggtatgatattaatttttgcaggtatcatgatgagtcaaataaatatacctagttga

SEQ ID NO: 7123 - DNA, 948 bp, Staphylococcus epidermidis
atgattacagcttataaacacgcacttcatcatccttcacaaattattgaaactgaaatcaatcatagtgcttcatggataaatgtagtagaaccagatagagaagaaattgaaggtttgatggaattttacaatatacctgaggattttattcgagatccgttagactctgaagagagtgcacgtattgaatatgacgaagatacgggatactcgctaattattattgacttacctatcgtcaattctaccaatcggcgtgtcttgtcgtttgtgaccatcccattaggcattattattggaaatggtatcgttatgactgtttgcgatgctgaaaatgaatttttagaaaactttgctaaacaagaagatattaacttgaaatttcacagtcgatttgcacttgaaatactaacaacaatagcaaatcactacaatagaaatttaagattgcttaataaatctaggattcgtattgaaagagaactcaaaaataacattactaacaagcagctttttaaactaatggaagtagaaaaaagtttagtatacttcttagctgcactaaaaggtaacgacacaattattaaaaaactctttcgtcttcctgcaatcaaacgttttgaagaggatgaagagctacttgaagacttggtgatagaaaacaaccaagctattgaaacgactgaattacatcaacgaatacttgagagtatcacttcttcgtatgcttcattattatctaatgatatgaataacatcatgaaaacattaacgttgtttacggttcttttgacccttcctacactcgtctttagtttctttggtatgaatgtacccttaccaattgatgatcatagttacgtgtcttggattattgttgtgggaatttcacttattctagtagctatcgttagtatctttttatggaaaaaacaaaaattataa

SEQ ID NO: 7124 - DNA, 1446 bp, Staphylococcus epidermidis
atgagttataaaaaatctgctgaagaaatacttaaagcaattggcggtgaagaaaatttagatgcaatggcacattgtgcaactcgattacgtttagtattgaacgatgagagtaaagtagatgaagataccttgtctaatatggacgtcgtcaaaggaacattctctacaggtggtcaataccaaattattataggttcagggacagtaaataaagtatttaatgaattagaaaaaataactggaaaagaagcatctacgacttcagaagttaaagataaatcatctaagcatatgaatccattccaaaaatttgtgaaaatgttatctgatatatttgttcttattattccggctattgtagctggtggtttgttaatgggattaaataatattttcacagctaaagatttgttctatgatggtaaatctatcatagatgtacatagtcaattttctggcttggctgatatgattaatatatttgcaaatgcaccttttacattattaccaatacttattggttttagtgcagctaagcgatttggtggtaatccttatttaggtgcagctctaggtatgatacttgttcatcctggattgatgagtgcatatgattttccaaaagctttagaagaaggaaaagctattccacactgggatgtctttgggctacatattaatgaagttggttatcagggacaagtattacctatgctcgtagcaacatatattttagctacgattgaaaaatggttacgtaaagttattccaactgtgttagataatttattgacgccattattatcaatttttattacagcatttataacatttttatttgtagggcctgtcactcgtcaattaggttattggttatctgatggattgacttggttatatgaatttggtggagctattggtggacttatatttggtttattatatgcgccaatcgtcattacaggaatgcaccatagctttattgcagttgaaacgacattaattgctgatgcgactaaaacaggtggttcatttatcttcccaatcgcaacgatgtcaaatattgcacaaggtggtgcagctttagctgcattctttatcattaagcaaaataaaaaattaaaaggtgttgcttccgcggcgggtatttcagctttactaggaattacagaaccagcaatgtttggtgtcaatcttaaattgagatatccatttataggtgctgttgcaggatcaggtataggtgcggcttatatttcattcttcaaagtaaaagcgatagcgcttggtacagctggattacctggatttatatctataaatcctacacacgctggttggttacattacttaataggaatgctaattgcatttgttgtttcagttgtcgtcactttagtactttctcgaagaaaaacaaataagacagctgttgaatcatag

SEQ ID NO: 7125 - DNA, 378 bp, Staphylococcus epidermidis
ttgaaagaacgcggaaaaatagaaaaattgtggcgtgaagaaaaatatcgtgtgctatttcatgatcagaatgcatatcattcgataagaacgttattaaaatcgcctaccacattgggtgaagtgaaagaacatataacgcacgctttaaccattacacctacaaaaggctcagttatcaatgcttttgaacatatgtgggggtatttcaaaaaacaatgtacacaatatgaaaaacaacatagccgagaattaaaagcgttgtatattgaaaatcaaattgactattttgagctgttgtcttttttaaaaaatttagcagataaatatgctgtcgagtacttacaacaaagtaccatactcaatattacaaaatga

SEQ ID NO: 7126 - DNA, 2106 bp, Staphylococcus epidermidis
atgacatgttttttaaatatatataaagaatatcattctccccctgaacgcaatattaatagaattattctgatgttttcacttacaaatgacttaaaaatcactattaatggtgaaacaaaagatttaggtaatcatatagctatcattaatcaatctgacatctattttattaatagtgcttcaaatctcgtattactctctattccagttatttatttttatagtaaagataataaattttttaaatgttattttgacagacatttattacaatcaagcagttttgttaaaacaattattttacaagctattcaacatttaataaaaggagaaaatcaagatgagcaatccatctctaaaataatacaaacgctactaaaagaagcagtcattcgatataagaaaaaatatattcctcaaattgcagttaatcattcagtgtttactgaaggattaacatttattcattcaaaagtatcacagtcactttcactacgagaagtagctcaacattgtaatatatctgaatcttattgttctaacctatttgcaagatatcttaatatgaattttaaagattattttacaagcttaaaagtgattgactctataaaaaggctactttcatctgaggactcaattaacgctatttcagaacaatctggatttagtagtcataccaattttacaaatcaatttaaaaattatttaggttgtagcccaaaacaataccgaacgattatctctaagttagactccttaccttcgataagttttagtgatactgacttttcacaatatattgatttaattaatcaatttgagtttagtgatcatttggctactgaaacgactgaaagagatatcaatgaattttatcctcaagatcagactaaaaactctaaagcgtttatacgttttcaaaatttcaacgaattatttcaatttgtttttaatgaatattacaacattgaccttacctccctgccacaagctgtaatttttatcaatgatatcactgatatttcgacgcgagaggtgaactttaatttattaaatcgatgctttgaaaaattattcgaaaaaaatataggtttagccatgagattaacatctacaaatgaatttgaatctatcaaagaaataattttattatttcttaatagccaccaagattataaaatgaacaaaaaaatggttaaatttatgttagtctttgaaactgagaatatgtcagtgaacgatatacatttatgccatttaaaaattaaaaataaaaataaggctatccgttatagtataactgttgaaggattactacaccaaaattcttctattgatcgaacttatgatatgatgaagcgattaaatttcgattactattttatagacattgaaaatctagaaaccaaaaactcattaattaccaaacgtaaatcgtacttacattcgtccacacactttgaaaattataaacaatttatattagattccggtataccttcaactaaatttgtttacaataatttatctttaaagtgttttaaatatacaaacaatggtacttatccacttcaattatctgaccttgtttgtcatttagtcgcattaatgcgttacgggggtggtgtaagttatcaactgatagaagatgagagtccttttattgccttatttaatcgttatggtagtcccctacctctcatgcacctctataaattaatcgaaccatttttaaatgaacctttagagatagccaacaattttttaatgagtcgcaaagatggtaactatcactttttattatttaataaaataaatgatcgttatctatctgatagtcaacagcgctacgtttttaaaaatacattatcaaccaactcattaattattattaaaacgttaaatcatgagcatggcgcaattcaaaaccttctaccacaaactaaacaacaattttatattgaacgtagtattcttgatgaacttgataaatcaaatcaaccaaaaacagaattagctatacaacatgaccatcatcttccttttcatgtcaccttaaaacacgatgaagtcaaatatatttgttttaaaccttcttaa

SEQ ID NO: 7127 - DNA, 423 bp, Staphylococcus epidermidis
ttgaataaacaacaagtgacaaaagcaatagaaaaagtattaaattcttcaaaaattggtgtcctatcaacagcacatcataataaacctaatagcagatatatggtcttttacaacgatgacttaaacttatatacaaaaacgaatatcaattcactaaaagtcgaagaaatagaaaataatcctgatgctcacattttattaggctataacgaaacaacaaacaatagctttgttgaaatagatgccactatagaaattgtcaaagatcaaaaagttattgattggttatgggaaactcaagacaaaacatttttcaattcaaaagaagatccagaattatgtgtactcaaagttatacctcgttcaattaaattaatgaatgatgatgaactagatacgccagctacaattgagttataa

SEQ ID NO: 7128 - DNA, 351 bp, Staphylococcus epidermidis
atgaaaaataaaaaaggattaggcataggtcttatcacaattatggttatcgtttgtattgtactagtaatcatgatgctcgtgggtggtaagaaagattcatactacggtattatgaaagatagcacgactattgataaaatgataaatactaaaaatgaaaaaattgaaaaaaacgtagaattacctaaagatgctaatgtatcagttaaaaaagaagattttgtgatgctctttaaagatgaaaaaactggaaaaattactaaagttaagaaagttaatcacgatgacgtacctcatggtttaatgtcaaaaatccatgatatgggtaatatgaaacacggaatgtag

SEQ ID NO: 7129 - DNA, 1281 bp, Staphylococcus epidermidis
atggctctattcaagaaaaaaataagtctaccaacgcaagtaattattgctttggtactcggtgtcatcgctggtctattactatatggacaagatgatgttgcaaattatattaagccatttggtgatgtgttcttaaatttaattaagatgatcatcattccgattgtattttgttcattagccttatctatttcaaatttaggggattctaaaaaggtaggaagctatggatggaaagcaatcctttattttgagattattacaactatcgctataggtttaggtcttatcattggtaatctattcaaaccaggttcaggtctagatccagataaattacctaaaggcgatattactaaatatcaatcatctgcacattcagcagaacaagcgactacttatggtaatcatcttatagatacattagttcatattgtgccaacgaatttatttgaatctatggcaaaaggtgagttattaccgattatctttttcgcagtattttttggattaggattagctgcgataggagaaaaagcagaacccgttaaaggattcttaaatggtactttagaagctgtattttggatgatcaataaaattttaaaattagctccaattggagtatttgcatttatctgtacgacagtaatgacttttggtgcttctgcattaattccattatttaaattattagttgttgtagtatttgctatggttttctttgttattgtagtattaggaattgttgcaagaatggttggaataagtattttttcaatcatgaagatacttaaaagtgaattgttacttgccttttctacttcaagttcagaagcagtattgccgattatgatgaagaaaatggaacgctttggttcgccaaaagatgttacttcatttgttattcctatcggttattcatttaatttagatggctcagctttatatcaatctatagctgctttatttgttgctcaaatgtatgatatacatttatcattaactgaacaacttgtattaatggccacacttatgattgcttcaaagggtatggctggggtgccaggcgtatctattgtagttttattaacaacattaacttctatgaacataacagcacaaggtcttgctttaattattggcgttgatcgtttattagatatggttcgtacatgtgttaatgttattggtaatgcactatcaacagttgttattgctaagtgggaaaacgtctatgataaagagaaaggtcaaaactacttaaattcaatttaa

SEQ ID NO: 7130 - DNA, 366 bp, Staphylococcus epidermidis
atgagtaagaaacaggttatttttagggtaatcattattttgattatctctctaatattagcaattgcatttttctttggactcaaagcttatcaaggtcataaaaatcttgaactgattgatagctatatgagcgaccatcatcttaatgataaagtgaaaaaagacaaaacatcatatagcactaaaaaggggctatactataaagaagtcgttttcaaagatgaacctaacgtgacatatgtgattcaacctatcagtacttcaaaaggaatattcattgaaggttttgatagcgaaacgaagaaaagtattaaaaaagcaaaacatagtgattttgatcaaaaatataaaccttctaaataa

SEQ ID NO: 7131 - DNA, 630 bp, Staphylococcus epidermidis
ttgacacgtataaatgattttaacgaagtgcttaacagtagaaaatcagtaaaggtatttgatgagaattataaaattcctcgagaagaaatggatgaaatcattactaaagcaactaaagcaccatcatcggttaatatgcaaccatggagaattgctgttgtagaaagtgatgaaatgaaagaaaaagttaaagaatcatttggattcaattccagacagttaacaacatcctcagctatgttaattatttttggagatttacaaaactacgaaaaagctgaacagatttatggcgatgctgtagaacaacaattgatgacagaagatatcaaagcacaactgttagattggatattaccctattataaaaacttatctagagaaggcatgaaagatattgtgaatatagatagtagtttaatggcaatgcaattaatgcttacagcgaaagctcatggatacgatacaaaccctattggcggcttcgataaagaaaatattgcggatattatcggttatgattctgacagatatgtgccagttttagcgattgctataggtaaaaaagcacaagatgcacacgattcagtgagacttccaattgatgatgtaagggagtttttataa

SEQ ID NO: 7132 - DNA, 447 bp, Staphylococcus epidermidis
atgtatgtagagaatagttatttgagcaaacaattatgttttttattttatgtttcctctaaagaaatcatcaaaaaatatacagattacctaaaagagtatggtcttacatacacaggttatattgtattaatggcgatagaagatgatgagaaacttaacattaaaaaactaggtgaaagagtcttcttggattctggcacgctgacaccattattaaaaaaattagagaaaaagaattatgtcattcgaactcgtgaagaacaagatgaacggaaccttcaaatttctttaacagaacgtggcaaggatattcaaaatgttctatctgatatttcacaaagtgtttttaatgaatttaatattactcaagaagaaacccaaaatttagttgaagacttgcaaaattttgtaacgaaaaattttgataaaacagtggaaaagtga

SEQ ID NO: 7133 - DNA, 1164 bp, Staphylococcus epidermidis
atgaacatgaaaaagggtgtttctcagcttacgttacagacattgagtttggtcgcaggctttatggcatggagtatcatttctccattaatgccatttatttcacaagatgttgatatttctccaggacaaatatctgtcattttagctattcctgttattttaggttctgtactacgtgtaccatttgggtacttaactaacattgtaggagcgaaatgggtgtttttctggagttttattgtactattattttcaatttttcttttaggtcaagctcaatcacccggtatgctaatgttatcaggattctttctaggaattggtggcgcaattttttcagtaggtgttacttcagtacctaaatacttttcaaaagacaaagttggtttagcaaatggtatatatggtgtaggtaatattggtactgcagtttcatcattttgtgccccagtgttagcaggtgcaattggctggcaaaatacagttcgtagttatttaattattctaagtatatttgcaattttaatgttttttttaggagataaaaatgagccgaaagtgaagattcctttgatggctcaagtcaaagacctatctaagaattataagttgtattatttaagtttgtggtattttattacttttggagcttttgtggcttttgggatctttttaccgaactttctagttgatcattttagtattgataaagtggatgcaggtattcgttcaggtatatttatagcactagcgacgttcttaagaccggttggtggagttataggtgataaatttaatgcagtacaagcgcttatcatcgacttcgtgataatgattattggtgcgcttatattaagcttatctagtcatattgttctgtttacgataggctgtttagcaattagtatctgtgcaggtataggtaatggtttaatatttaaattagtaccttcatacttttctaaagaagcaggttcagctaatggtattgtatccatgatgggaggactaggcggtttcttcccaccactagtgattacttttgtaacgagtatcactggttcaagtcatctcgctttcttcttcttggctatatttggtgtaattgctcttattacaatgattcatttaaataaaaaagaaaaagctattcgtatataa

SEQ ID NO: 7134 - DNA, 657 bp, Staphylococcus epidermidis
gtgaaaatagttatagcggatgaccatgcagttgttaggacaggattttcaatgatattaaattatcaagaagatatggaagttgttgcaactgcagctgacggggttgaagcttatcaaaaagtgttagaacatcgaccagatgttttaattttagatttgagcatgccaccaggagagtctggcttaatcgcaaccagtaaaatttctgaaagttttcctgaaactaaaattttaatacttacgatgtttgatgacgaagaatatttatttcatgtgttaaaaagtggtgctaaaggatacattttaaagaattcacctgatgagcaattaatattggccgtacgtacagtatatcaaggtgaaacttatgttgatatgaaattgacgacgtctttagtcaatgagtttgtcaatcaatctcaaacggatgaagtgtcatcctcttcagatccatttaaaattttatcgaaacgagagttagaaatattacctcttatagctaaaggctatggcaataaagatattgcagaaaagttatttgtatcagtgaaaacggtagaggcacataaaacgcatattatgacgaaactaaatttaaagagtaaacctgaattagttgaatatgctttaaagaaaaaattattagaattttaa

SEQ ID NO: 7135 - DNA, 1035 bp, Staphylococcus epidermidis
atgttggagcaaactgatttaagtttagagcaattacttaagaattattatgaaaccacgaacgagaaaattgtatttgttaatagacaaggcaaaattattgctatgaatgacgcagcaaaagatattttaactgaggaagataattataatgctatgacaaatgcgatttgtcatcgatgcgaaggatactctaatgaatatgatgtacaatcgtgtaaagattgttttttagagacaacgcaattacaacattccaatttccaagtatttatgaagacaaaagataatgaaattaagccttttacagctatgtatcaaaatattgatgaacaaagaggtattagtgcatttaccttacagaatgtggcgcctcagattgaaaggcaagaaaaaatgtatcaacaaaaaatgttacatcgttcaattcaagcacaagaaaatgaacgaaagcgtatttctagagaattacatgatagtgtaatacaggatatgctcaatatagatgttgaactaaggcttttgaagtataagcacagggataaggtgttagctgaaacatctcaacgtatagaaggcttattatcacagcttattgatgatattagaaatatgtctgttgaattaagaccttcttctctcgacgatttaggcattgaagcagcttttaaatcatattttaaacagtttgaagaaaattatggtatgcatattaaatatgattcgaacattaaaggcatgcgttttgataatgaaattgaaacagttgtgtatcgtgtagttcaagagggtgtatttaatgctctaaaatatgctgaggttaatgaaattgaggtaagtacgcatagtgatggcaagcagcttgtagcagaggttgtggatcgaggtaaagggtttagtttagatcatcaccctaaaggctctggacttggattgtacggaatgagagaacgtgcagaattagttaacggtcatgttaatatagagacacatattaatagaggtactataattacattagatataccgatttaa

SEQ ID NO: 7136 - DNA, 453 bp, Staphylococcus epidermidis
gtggaaccagaatctttaaaacataatcaacatttacaaatgaatttagataagttgagagcgcaagagggttatgattttggtggtatcgctttatatgattatcatcacacttcatcaccaattaaatggcaatatgtttcaggtaatacaaatgatagatataaacttatcattttgagaaagggtagagggcttgctggaatggtgatgaaaaccggtaaacgtatggttattgctgatgtagatacagctttatctccagaagagaaagttaaatttccaatcattcttagtgagtcattgacagctgtagttgcagtccctttatggttagaaaattcaatgtatggcgttttattattaggtcaaagaaatcatcagccgttacctcagtcattggaccaacttaatattgaaaaacaaatcggtatttttacagaaataaactag

SEQ ID NO: 7137 - DNA, 678 bp, Staphylococcus epidermidis
atgcttaatcaatttgtatggattatttatccatatttatgtttagcaatatttgttattggacatatcgcaagatataaatacgatcaattttcatggacagcaaagtcgagtgaaatgattgaaaagaaacaattaaaatggggaagtttactttttcatttaggtattattccggtgttctttggtcatgttgtgggattattgattcccgctaattggttagaggcgataggtgtaaataatcatatctatcatataggtgcagtttatataggtagtgtttttggtataataacattaataggaatgttgttgctaactttaagacgactatccatcaaaaatgttagacgattaagttcattttcagatatattcgtaaatctcgttttgttgattattttaataatgggttgttattctacgcttgtaaccaatgcgattcaacctgaatttgattatcgtcaaaccattgcgatatggtttagacatttattcatgttttctccaaatgctgacttaatgttaaacgtgccttggtcgtttaaactgcacatattattagggtttacagtatttgcgtgttggccatttactcgtttagtacatgtttggagtgtaccactgtcttatatgaatagaagatacattgtttatcgcaaaaacaaaatttaa

SEQ ID NO: 7138 - DNA, 576 bp, Staphylococcus epidermidis
gtgattaaccttgaacaattaagtctataccaagatagcttaggctatcttggtcaacaaatgaattttccagaaaaaatgacatttcacccaaaaatatttgaagaaaccatttctaagtctcatcccggctacgaagatttgcttgcatatagagaagtcatgatgaattatactttgtcagaaattaaagctatctatacagatacatttgattttagtaaaaaacacccactctatatgacatttaataaatttgacacgcaaaaggaacgtggtcaaatgctagctaaattaaaggttttatacgaaatgtttggactaaaaatggttgataatgaattatctgattttctcccattgatgctacagtttttgcaagttgctgattttaaaaatgatagtcgagcacaggaaaaccttcaacttgtcattatgattattgaagatggtacgtatgaaatggcaaataccctagctgaaaacaataatccctatgcatatgttgtcagtgcattaagaaaaacgttaaaagcgtgtatcatgcctttgaaagaggtggaaaatcatgcttaa

SEQ ID NO: 7139 - DNA, 1554 bp, Staphylococcus epidermidis
ttgaagattaaagcgcaagttgcaatggtattgaatctagacaaatgtattggttgtcatacttgcagtgtgacatgtaaaaacacatggacaaatcgacctggtgcagagtatatgtggtttaataacgtagaaacgaaaccgggcgtaggatatccaaaaagatgggaagaccaaggacaatataaaggtggttgggtgctaaataaaacaggaaagcttgaattaaaatctggtaatagatggtcaaaaattgctttaggtaaaatcttctataatcctgacatgccactcattcaagattattatgaaccgtggacatataactatgaacatttaaccaatgccaaacaaggacaacactctcccgtggcgacagcacactctttaatttcaggtgatagattgaatcttaaatggggaccaaactgggaagatgatttagctggaggccacattacaggaccagaggatccaaatattcagaaaatagaagaagatattaaattccaattcgatgagacatttatgatgtatttaccaagactatgtgaacactgtttaaatccaagttgcgtagcatcttgtccatcaggagctatgtataaacgagatgaggatggtatcgtactcgtcgatcaagaagcctgtcgaggttggagatactgtatgactggatgtccgtataaaaaagtatattttaactggaaaacgaataaagctgaaaaatgtacattttgtttcccacgaatcgaagctggtatgccaactgtatgttcagaaacttgtacaggacgtatgagatatttaggtgttttattatatgacgcagatcgtgttcaagaagcggcttcagctaaagatgaaaaagacttatacgaaaaacaattagacctattccttgatccatttgatgaggaagtcattgctcaagctgaaaaagatggaataaatcaagaatggatcacagcagctcaaaactcaccagtgtataaattggcaatagaatataaaatggcctttccattgcatcctgaatttagaactatgccaatggtatggtattgtccacctttaagtcctattatgagttatttcgaaggtgaaaatgcaggtcaaaatccagacatgattttcccagctattgaagaaatgcgtttacctattcaatacttagcaaatttattaactgctggcgacacagaacctgttaaagagggcttacaaaaaatggcgatgatgcgaagttatatgcgttctcaaataacaaaccaacctttcgatacatctaaattagaacgattaggacttactgaaagacagatgactgaaatgtatcgcttactaggtattgctaaatatgaagatcgttttgttgtgccttcttctcataaagaaacatatttagatacttataaagcgcaaggaagtcaaggttatggtggagagtactttggctctaattgtgaaggttgtggtgttgcagttcaatcaggtaaaactggacaagaaatttataatgaaaatttctatggagggatcttccgtgattaa

SEQ ID NO: 7140 - DNA, 3684 bp, Staphylococcus epidermidis
atgggaaaatttggattgaatttctttaaaccgacagaaaagtttaatggaaattggtcggtattagagcataaaagtcgagaatgggaaaagatgtatagagaaagatggagccacgacaaagttgtgagaacgacgcatggtgttaactgtactggatcatgttcatggaaagtatttgtcaaaaacggcgtaattacatgggaaaatcaacaaattgattatccaagttgtggacctgatatgccagaatttgagccaagaggttgtccgagaggtgcatcattttcttggtatgaatatagtccgttaagagttaaatatccttatattagaggtaaattattagatttatggaccgaagcgcttgaagaacaaaagggaaaccgaattgcggcatgggcatccatcgtagaaaatgaagaaaaagccaaacaatataaagaagcaagaggtaaaggtggacacgtcagagcaaattggaaagatgtcacagatatcattgcagctcaaattttatacaccataaaaaaagatgggccggatcgtattgctggatttactcctattcctgctatgtcgatgattagttatgcttcaggagcaagatttattaatttgttaggtggagaaatgttaagtttttacgattggtatgctgatttaccacctgcatctccacaaatttggggtgagcaaacagacgtgccagaatccagtgattggtacaacgcctcatacataatgatgtggggatcaaacgttccattaacacgtacacctgacgcacattttatgactgaagttagatataaaggggcgaaagttatttcagtagcacctgattatgctgagaatgttaagttcgccgatcattggcttgcaccacatccggggacagatgcagcggttgcacaagcaatgacacatgttattttacaggaatattatgaaaatcaaccgaatgatatgtttattaactatgctaagcaatattctgatatgccgtttgtcattatgttagatgaagatgagaatggctataaagcaggtagattcttgcgtgcttctgatttagggatgtcaggtgaaaataatgaatggaagccagttattcaagacaaattgagtcaacaattacttgttcctaatggcacaatgggccaacgctgggaagaaggtaaaaaatggaatttgaaacttgaaacagaggacggtacaccgattgatccaatgttatcaatggctgaaagtgactatcatgttgatacgattcaatttccatactttgatagcagtggtgatggcatctttgagagacctattgcaacgagaactattcaattagctaacggagagaaagttaaaatcgctacggtttatgatttaatgacgagtcaatatggtgtccaacgttttgaacacgaactagaagctacatcatatgatgacgcatcttctaaatatacgcccgcttggcaagaacaaattacaggtatcaaaaaagagttagtgacgaaagtggcaaaagaatttgcacaaaatgctattgatactggtggacgttcaatgattattatgggggctggtatcaaccattggtttaactcggatactatttatcgttcaatacttaacttagtactattgtgtggatgtcaaggtgttaacggtggtggttgggcacactatgttggacaagaaaaatgtcgaccaattgaaggatggaatactattgcatttgctaaagattggcaaggtcctccacgtttacaaaatggtacaagttggttttatttcgctacagatcaatggaagtatgaagaatcaaatgtagataaattgaaatcaccattagctgaaaatattaagcatcaacatccagctgattacaatgtaacggctgctcgtatgggttggttgccttcatatccacagtttaataaaaacagtctattgtttggagaagaagctaaagatgaaggtgatgattcaaatgaagctatcctacaaaaagcgattgaatcagttaaaaataaagatacacaatttgcgatagaagatccagatttaagaaaaaaccatcctaaaacattatttgtatggagatctaatttaatttctagttcagctaaaggacaagaatactttatgaagcacttgttaggtgcgcgctctggtttaatggcagagccaaatgaagatgataaaccagaggaaattaaatggcgcgaggatacagaagggaaactcgatttattagtatcacttgatttcagaatgactgcaacgccattatattcagatatcgttttacctgctgcaacttggtatgaaaaacatgatttatcttctacagacatgcatccatttattcatccatttaatccagcgatcgacccattatgggaatcgcgttcggactgggatatttataaaactctaagtaaagctgtttcagaaatggccaaagattatcttccaggtaaatttaaagatgtcgtaactacgccattaggacatgattctaaacaagaaatttcaactgaatacggtattgtaaaagattggtctaagggagaaattgaaggtgtaccaggtaaaacaatgcctaatttttctatagtagagcgagactatacacaaatttacgataaattcgttactgttggtccaaaactagaaaaaggaaaaataggtgcccatggggtgagttatagcgttagtgaagagtacgaagaacttaaaagtatggttggaacttggaatgatgataatactacttcagttaaaaatgatagaccgagaatagatacagcgagaaaagtagcagatgtcattttgaatatatcctctgctacaaacggcaaattatcacaaaagtcatatgaagatttagaaaatcaaacaggtatggaacttaaagatatttctaaagaacgtgcttctgaaaagatatcatttttaaacattacttctcagccaagagaagtgattccaactgcagtattccctggctctaataaagatggaagacgctactcaccgtttacaactaatgtggaacgtttagtgccatttagaacgctaactggacgtcaaagttattatatagatcatgaggtattccaacaatttggagaaagtttaccggtatataaacctactttacctccaatggtatttggtgctcgtgataaaaaagttaaaggtggacaagatacattagtgcttcgataccttacacctcatggaaaatggaacattcattcaacttatcaagataatgaacgcatgttgacattgtttagaggtgggccggttgtatggatttcaaatgaagacgcagcggaccatggcattaatgataacgactggttagaagtatacaacagaaacggagttgttactgccagagctgtaacatctcatcgtatgcctagaggcacaatgtttatgtatcatgcacaagataaacacatagagacacctggttctgaaattactgatactcgtggaggttctcataatgcacctactcgtattcacttgaaacctactcaattagtaggaggatatgcacaaattagttatcactttaactattatggaccaattggaaatcaaagagatgagtatgtagctgttagaaaaatgaaggaggtcaattggcttgaagattaa

SEQ ID NO: 7141 - DNA, 936 bp, Staphylococcus epidermidis
atgtctataacttatcctggcacagtttatctaatcggtgcaggaccaggcaatccaaacttactaactaaaaaagctgaacggttaattagatcagctgacgtgattttatttgatcgtctcgtgaatcctttcatcttacagtatgcttcttctcaaacaaaagtgatcaatgtaggaaagaaaccttattgtaaacacattcaacaagatgagattaatcaaaaaattgttgaagcagccaaacaatatcgatgtgtggtgagactaaaggggggcgatcctgcgatttttggtagaattacagaagaagtacaaacattagaaaatcatcatattcattatgagattgtccctggtgtgacatcagcaagtgctgccgtagcaactatgaatatgggattaacgatgcgttctatcgcaccgagtgtgaccttctcaactggtcattttaaagattcggttaatcacgatacggatattaggaacttgattaatggaggcactttagctatttatatgggtgtgaaaagattaggtcaaattattaaacaaattgaatcatatacgaatgaagactaccccattgcaatagtgtttaatgcttcctgctacaatgaaaagattgttataggtcatttaagtacgattgaagaacaattggtttctcaacaactagaaggtcatccaggcatatgcattttaggtaatatacttgatgacattaatcgtacgttattgaataataataagaatgacaagggaaatctatatttaatcaagggagataaagaacgtgcaattgcaagggctgaaactttatatgatgaaggaatccaatgtctgattgattttgaccatagctaccacatttctcaacaaaacgtgtataacgaaatgattcaacacaagagtattaaaacaatatatgtataa

SEQ ID NO: 7142 - DNA, 315 bp, Staphylococcus epidermidis
atgaaagctaaagaaaagattaaagttacaacaatgaatgaaatgattcctcaaataggcaaaaaagtagttgtaaacgaaaaagaaataggtatttttctcacagataatggtgatttatatgccattggaaatatatgtccacataaagaaggaccgttgtctgaagggactgtaagtggtgattatgtttactgtccgttacacgatcaaaaaatagctttaaaaactggagaagtacaacaacctgatacaggatgtgtagagacatacgaagtagaagttattgatggagatatttacttatgtctataa

SEQ ID NO: 7143 - DNA, 2406 bp, Staphylococcus epidermidis
atggcaaaacaaaaacttgtaatgattggtaatggcatggcagggttaagaacgatagaagagattttagaacgttcacaatcacaatttgatattactattattgggaaagaaccttatccgaactataacagaattatgttatccaatattttacagaagaaaatgactgtcgaagatacaattatgaatccttatgattggtatcaagagaataatattgaacttataaataatgatccagtggaaaaagttgataaagaaaacaaaatagttactacttctaaaggtattgaagtagagtatgacatttgtattttcgctactggatcaaaagcttttgtattacctataccaggttcaaatcttcctagtgtcattggatggcgaacaattgatgatacaaataaaatgattgaaattgcccaaacgaaaaaacgcgcagttgtcattggtggaggtcttctaggcttagagtgtgccagaggacttctagatcaaggaatggaagtgacagttcttcatttagctgattggctcatggaaatgcaattggatcgtaaagccggagaaatgcttaaagcggatttagaaaagcaaggtatgaagattgaacttcaagcaaattctaaagaaatcattggtgataaagatgttgaagctattaaattagctgacggtcgggtgattgaaacagatttagtagttatggctgttggtatcagaccttatactgaagttgctaaagatagtggattagatgtcaatagaggtattgttgtaaatgattatatgcaaacatctgattctcatatttatgcagtcggtgaatgtgccgaacatgatgggaaagtttatggattggtggcgccactttatgaacaaggcaaagtgctagcagattatttaactggtaaagaaacaaaaggttataaaggatctactactttcacttcacttaaagtatctggttgtgatttatatagtgcagggcaaattgttgaagatgaagatgtccatggtgtggaaatttttaatagtgtcgacaatatctacaaaaaagtgtatttaagtcagggtcaagtcgttggtgctgtcttgtatggtgatactgatgatggatcacgattttataatatgatgaaaaaacatgaaacgcttgaagattatacacttgtttctttattgcataaaggtgatgaagatgcggggatatctattgctgatatgtctgatgatgaaacgatttgtggatgtaatggtgttgataaaggaacaatcgtcaatgctattacaagtaaaggtttaacgtctgtagatgaagtgactaaagcaacaaaagcaggtaattcatgtggtaagtgtaaaggtcaaatcggtgagttattacaatatacattaggtgacgactttattgctgcaaaaccaacaggtatttgtccatgtactgatttaacaagagaccaaattgtaactcaaatcagggctaaaaatctcaaatcatcaaaagaagtacgacacgttcttgatttcaaagataaagatggttgtcctaaatgtcgacctgcaattaattattatttaaatatggtttatccttttgaacatcgagacgaaaaagattctcgcttcgctaatgaaagatatcatgcaaatatacaaaatgatggtactttctcagtgattcctcaaatgcgtggtggtgttacagatgctgaccaactcattcgattaggagaagttgctaaaaagtataacgtaccacttgttaaagtaacaggttcgcaacgtgtaggtttatatggattgaagaaagaagaattaccacaagtttggaaagatttaggaatgcgttctgcttctgcttatggtaaaaagacgcgttctgttaaaagttgcgttggtaaagagttttgtcgttttggtacacaatacacaactcgactaggaataagacttgaaaaaacatttgaatatattgatacacctcataaatttaaaatgggagtatcaggttgtccgagaagttgtgtagagtctggtgttaaagattttggcgtcatatctgttgaaaatggctaccaaatatttatcggaggtaatggtggtactgatgttactgtaggtaaattgttaacgacagttgaaaccgaagatgaagtgattcaattatgtggtgccctcatgcagtattacagagaaacaggtgtttacgctgaaagaacagcaccatggttagaacgtatgggctttgaaaatgtcaagaatgtcttattaaatcaagaaaagcaaaaagaactgtatttaagaattatggaagccaaaaaagctgttgagaatgaaccatgggaaactattgttgaaaataaagaagcacaaaaaatctttgaagttgagaaggtgtaa

SEQ ID NO: 7144 - DNA, 720 bp, Staphylococcus epidermidis
atgataggtaatattctagtcgctcacggcatgagaaaaggaaatcagaatgaagctttagaagaatttatcggaactttattaaaagatgagcaatattattatgagttagcatttttagaaagtgaaacacaaaatcttgaaatcataatggagaagatgattaagcaaggaattacaaaatttcgtattgtacctttactcatttttagtgcaatgcattatatcagtgatattccacaaatacttaaagagatgaaagctcgatatccacaaattgatagtaaaatgagtgcgcctcttggtacgcatccatatatgaaaacattagtagaaaatagaattgctgatgaaaaagtcagtgaaggttcaaccaaagcaactatagtaattgcccatggaaatggaagtggacgttttacgaaagcacatgatgaattaaaaacatttgttaaaacgcttgatagccatcatcctgtttatgcaagagctttatatgggacattagcatttaaaaatgatttagataaaatctcagagcaatatgacgagttagtcattgtcccattatttttatttgatggtagattggtgaataaagtaaaacgtcttttaggtaaaatgaccttgcatagtcaattacacattacgccatcgattaattttgatccaattttaagattaattattagagaaagacttgaagcgttagatatttaa

SEQ ID NO: 7145 - DNA, 1476 bp, Staphylococcus epidermidis
atgaaaaaattgattactcttattgtcatgatatcttttgttttagcgagctgtgggggcacctcaagtacagacaaagacaccctcaatgttgaaatacctttgaaaactaaatcaattgcaccttacgaaactgatatcccagttaaaacaggtgccttggaatcgctttttaaaatgtcgaagaatggtaaagttaaacctttattagtcaaaaattatcatcaagtatctgacaatcaactagaactcactttaaaagataatattaaatttcaaaacggtcatcatttaacaggcgaagctgtaaaacgcagtctcgaagaaggaatgaaaaaaagtgatttgttaaaaggatcacttcctatcaaatcaatcaatgctcatggacaaaaagtcacaatcaatactaaagaaccttatccagaattaatgtctgaactcgcaagcccatttgctgctatttacgacacaaaagctaaaaacaaagtaactgatcaacctgttggtacgggtccttataaaattgatcagtataaacgttctcaaaaaatcgtactaaaacaattcaaagactactggcaaggtacgccaaaattaaaaagaattaatgtcacttatcatgaagatggtaatactcgtgttgatcacttattatcaggcaaatcagatttgactactgatgttccaattgaacgcgttgatgatgtaaaaaaatctaacaaagcaaacattcaaagtacatcaggctttagaacgcatttaatgttatacaatcatgatagtaaaaaagttaataaaaaagtaagagaagcactagatatgattattaatcgaaaagacattgctaaaaatatttctaaaaattatgctgagccagcatcaggtccttttaaccatcgattaaaatcattagaaaaagaggaaattcaatcacaagacatcaagcgtgcaaaagaacttttagctcaagaaggttattccaaatcgcatcctcttaaattaaacatggtcacatacgatggcagaccagaattgcctaaaattggacaggtgatacaatctgaagctaaaaaggcaaatgttgatatacaattacgcaatgtagatgatatcgaaggatatctcaaaaacaagcaggcttgggatgtttcaatgtatagttatttaagtgtgccacgtggtgatacaggttatttctttaacactgcatacttacctgatggagcattaaataaaggtaattatagtaatactaaagtcactcagttaattaaagaattaaatactactttcggtgacaagcaacgtggtcaagtgactaatgaaatactaaatgaatctaaaaaagatattcctaacagctatatcacatacaactctcaaatagatggtgtgaataataaagtaagacattttaatgttacaccagaatctatctatttaattgattataaattaagtaaaaaagaataa

SEQ ID NO: 7146 - DNA, 1254 bp, Staphylococcus epidermidis
atgtcaaaattaattttggcggtaaatgctggtagctcatctttaaagttccagctaattaagatgcctgaagaaaaactagtaactaaaggtgtgatagaacgtattggtttaagcgattctatcttcaccattcatgttaatggcgagaagcttactgatatcagagatatccataatcatgaagaagccgttaatataatgttagatagttttaaagaacatgaaatgattaaagacatcactgatattcaaggaacaggtcatcgtgttgtacacggtggtgaaactttccctaaatcagttgttgttactgatgaagtagaatctcaaattgaagaattaagtgaattagcacctttacacaatccagctaatttaatgggaattagagcttttagaaagttattaccagaaatcccacacgttgcagtgtttgatacttctttccatcaaacgatgcctgaacaagcttatttatatagcttgccatatcattactatgaagactatggcatacgtaagtatggtttccacggtacaagtcataaatatgtatctcgtagagctgctcaaattgttggtagaccaattgaagatttaagaattatttcttgtcacatcggtaacggtgcatctattgcagctatagatggtggagaatctattgatacatctatgggattcacaccacttgctggtgtaacgatggggactcgttcggggaatcttgatccagcattaataccattcattatggaaaaaacgggtaaaacagctgatgaagttttagaaatacttaataaagaatcaggattattaggtcttactgggacatcaagtgatttgcgtgatttaactgaagaagctaaacatggacgtcaacgttcccgtgttgctctggatttatttgcttcaaaaattcacaaatatattggctcttatgcagctagaatgcatggtgtagatgttattgtatttactgcaggaataggtgaaaattcacatattattcgtggtaaagttttagaaggacttgagtttatgggtgtttattgggatcctaagaagaatgaaagtttacatggtgaagaaggttatattaactatccacattcacctgtaaaagtacttgttgtacctactgatgaagaagtaatgatatctcgtgatgtgattaaatatggtaaacttaatgataatacacccaaaaaagaagaatttgataccaacgaaagtatcgaagtgaattaa

SEQ ID NO: 7147 - DNA, 948 bp, Staphylococcus epidermidis
atgtctgaagaaaatactattatggaacgtctatttcataaattagatgataaagctaaaacgttaaacaaagaaaatggacagagttttatcgaaaatttagggttagctatggaagatatttatacaaaccaaagagaacttttagaacaagcaacgcttcaagatagaaggaaagcttttcaatttgcatatttaagtttattacaagaagaaaatattcaagctaatcatcagatcacgcctgactctataggactcattctcggttttcttgttcaacgctttttagaacataaaaaggaaatgcacattgtagatattgcaagtggggcaggtcatctaagtgcagcagtgaaagaagtactttctgataaaacaattatgcatcatctgatagaggtagatccagtgctatcacgtgtaagtgtgcatttggctaattttttagagataccgtttgacgtttatcctcaagatgcgattatgccattaccattggaagaggctgatgtcgtgattggagatttcccaataggatactatcctttagatgaacgtagtagagaaatgaagttaggctttgaagaaggacacagttattcccatcatctgttaatagaacaatctattaatgcgctaaaaggggcaggttatgcatttttagttgttcctagtcatctctttgaagatgataaagtgaaacagttggaaaatttcattactacagagactgagatgcaagcatttttaaatttacctaaaacattatttaaaaatgaaaaagcacgtaaatctatattgattttacaaaagaaaaaatcaggcgaaactcgaccagttgaagtcttattagccaatatccctgattttaaaaatcctcaacaatttcaaggtttcatttctgaattgaatcagtggatagtcacaaatcatacaaaaaaatag

SEQ ID NO: 7148 - DNA, 495 bp, Staphylococcus epidermidis; identical to SEQ ID NO: 4535

SEQ ID NO: 7149 - DNA, 765 bp, Staphylococcus epidermidis; identical to SEQ ID NO: 4534

SEQ ID NO: 7150 - DNA, 1224 bp, Staphylococcus epidermidis; identical to SEQ ID NO: 5106

SEQ ID NO: 7151 - DNA, 1140 bp, Staphylococcus epidermidis; identical to SEQ ID NO: 4532

SEQ ID NO: 7152 - DNA, 1695 bp, Staphylococcus epidermidis
atggtgttatttatcatattagcaatattagtagttattttaattgctattggcgtattgttttatatgcgctcaaacaaaagaaatttaattgaaaaaacagaagagcgtaagaacgaaattgaacaattacctttagatgataacctaagaaaacttactggtttaaatttaaaaggtgaaacaaagactaagtatgatgcaatgaaaaaagacaacacagaaactacaaataaatacttagctccagtggaagaaaaaattcaaaatgctgaagagttgttagagaaatttaaattcacggcagcacaaactgaaattgatgatgctcacgaattaatggatcaatacgaagagaattatcagcatcaagtaactcaagtggacgacattataaacttacataaagaaaatgaagcattgtatgaaaagtgtaaagttgactatcgtgaaatgaaacgtgatgtattagccaatcgtcatcaatttggtgaagcagctgaaccacttgaaaatgaaatcgaaaattatgagcccaagttaaatgaatatgagaatttaaaaagtgaaggtaattatgttcaagctcataatcacattgctgctttagaagatcaaattaaaaatttaaaatcttatatggatgaaattccagaattaattcgagaaactcaaaaagaattaccaggacagtttcaagatttaaaatatggatgtagagacttaaaggttgaaggctatgatttagaccatgtcaaagtcgatggtacaatacaaagtcttaagacagaattaagttttgttgaaccaatgattagtcgattagaattagatgaagctaataataaacttgaaaatattaatgataaattagatgaaatgtatgatcttattgaatatgaagtaaaagccaaaaatgaagttgaagaaacgaaagatatcattactgatgacttatttaaggccaaagatatgaactatacattacaaaccgaaattgaatatgttcgtgaaaactactatattaatgaatcagatgctcaaagtgtaagacaatttgaaaatgaaattcaaagtctcatctcagtttatgatgatattttaaaagaaacttctaaatctgcggtacgttacagtgaagtacaagataatttacagtaccttgaagatcatgtatctgtgattaacaaagaacaagataaacttcaaaatcatcttatccaattacgcgaagatgaagctgaagcagaagataatttattgagagtgcaatctaagaaagaagaagtttatcgacgtttattagcttctaatttaactagcgtcccagaacgttttattatcatgaaaaatgaaattgataatgaagtaagagaagtaaatgaacaatttagagaacgtccaattcatgttaaacaactaaaggataaagtagcaaaaattgttattcaaatgaatacatttgaagatgaagctaacgatgtacttgtaaatgctgtatacgcagaaaagcttattcaatatggtaatagataccgtaaggaccatcatcatgttgataaaagcttaaatgaagctgaacgattatttaaaaataaccgatataaacgtgcgatagagatagctgaagaagcattagaaagtgttgaacctggtattaccaaacatattgaagagcaagtgattaaagaatag

SEQ ID NO: 7153 - DNA, 471 bp, Staphylococcus epidermidis; identical to SEQ ID NO: 4530

SEQ ID NO: 7154 - DNA, 117 bp, Staphylococcus epidermidis; identical to SEQ ID NO: 4529

SEQ ID NO: 7155 - DNA, 603 bp, Staphylococcus epidermidis; identical to SEQ ID NO: 4528

SEQ ID NO: 7156 - DNA, 747 bp, Staphylococcus epidermidis; identical to SEQ ID NO: 4527

SEQ ID NO: 7157 - DNA, 441 bp, Staphylococcus epidermidis; identical to SEQ ID NO: 4526

SEQ ID NO: 7158 - DNA, 1164 bp, Staphylococcus epidermidis; identical to SEQ ID NO: 4525

SEQ ID NO: 7159 - DNA, 1596 bp, Staphylococcus epidermidis; identical to SEQ ID NO: 4524

SEQ ID NO: 7160 - DNA, 1125 bp, Staphylococcus epidermidis; identical to SEQ ID NO: 5115

SEQ ID NO: 7161 - DNA, 1437 bp, Staphylococcus epidermidis
atgttacctgtagcagttctgccagcagccgcaattattgtaggcataggtcatgttttagatgctttaaatatacttcctcaagctgcactctttttcacaagtgttgggaccactatattagagcaattaggtatattatttgctattggtgtagctatcggtatggctaagaagaatgatggcgcagtagcattagcggcagcgttaggattttttatagttacagtagtactatctccagaaaaattagcaactttgttacaaattaaagaatctaaaattgatttagcattcagtcaaatgaataatggaaatgtgtttgtagggattattataggtttgattgctgcatatagttataacaaatttagtgaaacgaatttacctatggccttatcattcttcagtgggaaacgacttgttccaatcatgacagcattcttttgtacaattttagcgattattttattattgatttggcctccagtttataatgggatagttacttttggtaagtggattgttggtatgggtccattcggtgcattattatatggtttttttaatagattgttaatacctactgggttgcatcatgcgctcaataatgtattttggtttgatactgctggaataaatgacataggtaaatttcaaagtggtaaaaatgccattaagggaattactggcagataccaagcaggatttttccctgttatgatgtttggtgtaccggcagcagctttggcgatgtatcatactgcaaagacgaatcaaaaaaaacaagtttatgcttggtttttagcaagttcagtttcggcattctttgtgggtgtaactgaacccatagagtttgcattcatgtttgtagctccagttttatttgttattcatgctgttttaactggattatcattatttatagcagcaatgtttcattggacagcaggattttcatttagtgcaggtcttatagattatgtgctttcattggttaatccgatatctaatcaaccttggatgttattattgcagggtgtagtattttttattatctattacgttatctttagagttgtcatacaagtctttaatttaagtactataggtaggggagataatgaacttatcgatccaacatcaaatgatacttctgaaatggaagtattacagaacaaaaccactacaagtaaatattatcaaaacgcaaaacgtattttagacggattaggtggtaaagaaaacattattagtttaaatcattgtgcaacaaggcttagattggagcttaaagataattcgattatagatgagcagaaaattaaaaatgctggagctattggtataactcaaaatggacaccattatacccaagtgattattggaacacacgtacaacaagttgccaatgaaatggatcaccaaatgaattag

SEQ ID NO: 7162 - DNA, 624 bp, Staphylococcus epidermidis; identical to SEQ ID NO: 4521

SEQ ID NO: 7163 - DNA, 1239 bp, Staphylococcus epidermidis; identical to SEQ ID NO: 4520

SEQ ID NO: 7164 - DNA, 1266 bp, Staphylococcus epidermidis
atggctattgctttaatagaagatttaaaatggagagggttaatttatcaacaaacagatgaagaaggtatcgaagaattattaaataaggaacaggtcactttatattgtggcgcagaccctacagctgatagtttacatattggtcacttgttaccttttttaacattaagacgcttccaagaacatgggcatcgtcctatcgtcttaattggtggaggtactggtatgataggagatccttctggaaagtctgaagagcgcgtgttacaaacagaatcacaagttgaagctaacgtcaaaggcctgtctaatcaaatgcatcgattatttgaatttggcagtgataaaggggcaaaattagttaataataaagattggcttggtcaaatttcgttgattagttttcttagagattatggtaaacatgttggcgttaactatatgctaggaaaagattctattcaaacacgtttagaacatggtatctcttatacagaatttacttatactattttacaagctattgattttggctatttaaatcgtgagttaaattgtaaaattcaagtaggcggatctgatcaatggggtaatattacaagtggtattgaattaatgcgacgaatgtatggacaaactgaggcatatggcctaacaatcccattagtaactaaatcagatgggaagaaatttggtaaatcagagtctggagctgtgtggttagatcctgaaaagacaagtccatatgaattttatcaattttggattaatcaatctgacgaagatgtaattaaattcttaaaatattttacttttttagaaaaagaagaaattaatcgattagaacaatcaaaaaatgaagcgcctcacttacgtgaagcacagaaagcactagcggaaaatgttacgaaatttattcatggtgaagcagctttaaaagacgctatacgtatttcaaaagcactgtttagtggagatttaaaatcattatctgctaaagaacttaaagaagggtttaaagacgtacctcaagtaacgctatctacaaaaacgacaaatatagttgaagcacttattgaaacaggtattgcttcatctaaacgccaagcacgtgaagatgtaaacaacggtgcaatatatattaatggtgaacgtcaacaatcagtcgattatgagttaagtagtaaagaccttattgaagatgaaattacaataattcgacgaggaaagaaaaaatatttcatggttaattaccaatcataa

SEQ ID NO: 7165 - DNA, 906 bp, Staphylococcus epidermidis
atgcatttcaacaagtatcaaatactaactacagataaatatactaaatttgaacatttatataagaaggtcaaacatatatgtgtcgtaatttttttggtggtttttttgattggttttattatactgttgtcattagtattatacttccaacaactaactaaagatgcttcgtcaataagtgatcgagagttgaaagcaaaaatccttcatatacctggcgatgagctaataaatcataataatcaaattttaaaagaatatgatcattcacaaaatacactcatagttggaccgaaccatgtaaattcaaatattatacatgcacttacagcctctgaagatacattattttataaacataacggtattatgcctaaagcacttttaagggcgatgcttcaagatatcacaaattcaaaccaatcttctggtggtagtactatcacgcaacaattagtaaaaaatcaagtgctctcaaataaaaaaacttatagtcgtaaagcaaatgaaattatcttggctacacgggtcgaaaatttattatcaaaagatgaaatcatatatacgtatttaaatatcgtcccatttggtcatgactacaacggtgccaatataactggtatatcgtctgcttcatatagtctgtttggtatacctgcaaaagatttgaatattgcacaatcagcttatctcattggcttactgcaaagtccatacggctatacgccttatgacgaacacggcaaagtaaagccttaccatcttttaaaattgagcatgaaacgtcaacaatacgtacttaaacgtatgcgtgttgaaggaaaaatttctaaacaacaatacgaaaacgctaaaaaatacaatattaaacagcacttgctgaaacaatcgaaagacgaataa

SEQ ID NO: 7166 - DNA, 1668 bp, Staphylococcus epidermidis
ttggcacaattatcagatttagaaatagcaaacttatcaaaacttaaaccaataagtgaaattgcaagaaaagtagggattactgaggatgctttagaaccatacggccactataaagctaaaatagatattaatcagatacaagaacaggagaaaaaagggaaagtcgtattagtaactgctatgagcccaacaccagctggtgaaggaaaatccacagtaactgtaggtttagcagatgcatttaacaagttaaatcataatgttactgttgcattacgagaacctgccttaggaccaacttttggtattaaaggaggcgcaacaggtggtggttatgctcaagtgcttcctatggaagatattaatttacattttaatggtgattttcatgcaattactactgcaaacaatgcactttccgcatttatcgacaaccacctacatcaaggaaatgaattgggaattgatcaacgaagaattgaatggaaacgtgttttagatatgaatgatcgtgcgttacgtcatgttaacgtaggattaggtggtacaactcacggagtacctagagaagatggttttaatataacagttgcgtcagagataatggctattttatgtctaagccgaaatatcaaagatttaaaagaaaaaataagtcgaattaccattggttatacacgtcatcataaacctataacagtttctgatttgaaagtagaaggtgcattaactttaatacttaaagatgcgattaaaccaaatttagttcaaacaattgagggaactccagctcttgttcacggaggcccttttgccaatattgctcatggttgtaactctatattagcaactgaaactgctagaaacttatctgatattgttgttacagaagcaggatttggttctgatttaggtgccgagaagtttatgaacattaaagctcgtgaagcaggtttcgatccatcagcagttgttgttgtagcaacgattcgtgctttgaaaatgcacggtggtgttgcaaaagaccaacttcaacatgagaacatagaggctgttgaagcgggacttgttaatcttgaaagacatgtgaataatattaaaaaatacggtgtcgaaccaatagtagctttaaatgcatttattcatgacacaccttctgaaacagcgtgtgtgaaacaatgggctaaagataatcaagtacgtattgctttaacagaagtatgggaaaaaggtggagaaggtggaattgaacttgctaaccaagtgttcgatgtaatgcaggaacctcaaaactttaagcatttatatgagttaaaacaaccactcgaagctaaaattgaaacgattgttaaagaaatttatggaggttcaaaagtaaatttcagtagtaaagcacaaaaacaattaaagcaatttaaagagaatggctgggatgaatatccgatttgtatggctaaaactcaatattcatttagtgatgatcagacattgttaggtgccccgaatgattttgaaataacaattagagaacttgaagccaaaacaggcgctggattcatcgttgcattaactggtgctataatgactatgcctggtttaccgaagaaaccagctgcactaaatatggatgttactgatgatgggaaagcaataggtcttttctaa

SEQ ID NO: 7167 - DNA, 990 bp, Staphylococcus epidermidis
atgacagttacaatttatgatgtagcccgagaggctagggtatcaatggcaactgtttcacgtgtagtaaatggaaaccaaaatgttaaaccagaaacacgtaataaagtaaatgaagtcattaaaaggttaaactatcgacctaacgcagttgcaagaggtcttgcaagtaaacgtacaacgacagttggagttataattcccgatatttcaaatgtttattattctcaacttgcaagaggtttagaagatattgcaacaatgtacaaatatcactcaattatctcaaactcagataatgatccagaaaaagaaaaagaaatttttaataatttattaagtaaacaagtcgatggtattattttcttaggtggaactatttctgaagaaattaaaagtcttattaatcaatcatctgtaccagtcgtagtttctggaacggatggtaaggatgatcatattgcatctgtaaatattgattttaaacaagcagccgaagaagcaacacaatatcttatagagaagggtgctaaaacattttctttaataggtggagaatactctataaaggcacaagatgatgttttagagggccttaaaaatgttttaagtcagcatcaactaaaattagacgatacattacatttaactggcaatgaaagttacaaatcaggtataaaaacatttgaacaattgcaatcgaatttaccagatgctgttctttgtattagtgatgagcaagcaataggtatattgcatagtgcacaagatgctggagtgaaagtacctgaagacttacagattattagttttaacaatacacgtttagtagaaatggtgagaccacagttatctagtgttattcaaccattgtatgatattggtgctgttggaatgagattactgactaaatacatgaacgatgaagaaattgaaaatcctaatgtcatattgcctcatagaatagaataccgtgggacaagtcagtaa

SEQ ID NO: 7168 - DNA, 1092 bp, Staphylococcus epidermidis; identical to SEQ ID NO: 4515

SEQ ID NO: 7169 - DNA, 1224 bp, Staphylococcus epidermidis; identical to SEQ ID NO: 4514

SEQ ID NO: 7170 - DNA, 492 bp, Staphylococcus epidermidis; identical to SEQ ID NO: 5125

SEQ ID NO: 7171 - DNA, 1314 bp, Staphylococcus epidermidis; identical to SEQ ID NO: 5126

SEQ ID NO: 7172 - DNA, 3510 bp, Staphylococcus epidermidis
atgagctggtttgataaattatttggcgatgacaacggttcgaatgacgatttgttacgcaaaaataaaaatagacgtcagtctcagcaatcaaaacaaaataatcaagactcattactgcctcaaaataatgatatttatagtcgaccaagaggtaaatttagatttccaatacaagtttctgaaaatgaatatacgcaaaaaaatgaaaattataatgaacataaccaagaagaaacaaacgatataatgagatcatataaccagcatgataatcctgaatttgattcttctggtaaaagacatcgacgccgacgccaagcgtattcaaaacacgatcaatctaagattacacaacaaaagcaatttgcagataacaattatacaaataataacagtgtttttaatcaaaacgacaataagaaatcttcacaacaacgtaaatcaatacaatctgaaaatatcaaaaacaaagcaaacactaagaatacgtcgacatctcctgaatttacatatttaaatcatagttttaaatcaagcgaggtaccctcagcgatttttggtacaaaaaaacgaagaccgattgagaatggtgtcataccgccagaacataaggaattaaatgataaagagattgttcaacaggatgaagtctcgcattcaacgaaatcaatagatgcatcaaaaaatgtttctaatagtaacgataacaatattgaaaaaaatcaacagaaaaaacaacaaacaactgctcaaactgagtcatcatcagaaaatatgcataatgttgaaaagtcaaattatcaaactactaagcgtaaaacaccaaattactctaaagtagataatacgattaatattgaaaatatctatgcttcacaaattgtagaagaaatcagaagagaaagagaacgtaaagttctacagaaacgacgttttaagaaagccttacaacaaaaacgtcaacaaaatcaacagtcagaagaggattcaattcaaaaagctattgatgaaatgtatgctaagcaagcccaacattacacaggcgaaagttcattggatttagaaaatgaaagtaatcaagattcgtcatctaatagtctagagaaacaatcaaatagcagcaacattgacaataaagaagcccaaaataacacacctttatttaactacgaagaaattgacttagatacgacatcagatgtatataaagttaatgaagaagaaactgaatctaaaaatgatgaagatttagtatcatcaaatcattatcattctaatgatgatgcggaagtagaagatgccgaatatcacgaattagatgataaccgacaacaaaaccaaagtaactctcaagacgatataattagttcaaaatcaagtacttcaaatatgtatgataatgcaatcagtgcaagtgtagataataacactgaaagagctaaatcaaatgaagataaaaatgatacagaaattacacacttagatggaacaacaagtgcaaaagttagtgacgagaaaattgaatctaatacaaacaatcatttagaacaagataagaatgtaaaattaaaaaatgtaaattcattaaaatcttcaaattctgatacaggtcaaacaagaaaacaacgttttggtggtagtagaccgtttaatgttttaatgacaccatcagataaaaagagaatgatggatcaaaaccacaaaaaagtaagtgttccagagcttaaacctgaaaaacaagcgaatgcaaatcatagaaaagacagcgaatctaataaatctgaagaatttaaacaaatcaatactaatagagaaaccgattctaatagttatgaatctaatggcatagagcatgatatgaattcatcaagtgatgagcacgtatatgaaacaccatccaaacaacaggatgagcaaatacaaaagctacaagatgattttcattttgaaaacgcaaatcatgctaaaattaacaattcaaatgaaactggcaatcaaagtaatataagtcattcaaaacggtcacaatattcaacaaatgaaagtaaaaatattgatacacaaacttcaaattcaagtacatcaaatcaaaattttcaacgtattcgtaaaggaccgaatattaaattgccgagttatcaattattggaagccccagaaccacatgaaaaagatcaagattggatagataataaaaagcaagaattaaacgacgcattatattatttcaatgtgcctgcggaagtgaaaaatgtaacagaaggaccgagtgttactcgattcgaattatctgttgaaaaaggtgtcaaagtatcaagaatcacggcattacaagatgatataaaaatggctttagctgctaaagatattagaattgaagcaccaattccaggtacaagtttagtaggtattgaagtgccaaatcaaaatcctactaaagtgaatttaaggtcaattattgaatcacctaaatttaaaaatacagagtccaaacttacagttgcaatgggttatcgaattaataatgaacccttattaatggatatcgctaaaacgcctcatgcacttatcgctggtgctacagggtcaggcaaatcggtatgtatcaatagtatcttaatgtctttactttataaaaatcatccagaagaattgcgtttattactcattgatccgaaaatggtagaacttgcaccgtataacgatttaccacatcttgtatcacccgtaataacagatgtaaaagcagctacacaaagtttaaaatgggctgttgaagaaatggaaaaacgttataaattgtttgctcaatatcatgtcagaaatattactgctttcaataaaaaagcaccttatgagcaaagaatgcctaaaattgttatagtaattgatgagttagctgatcttatgatgatggcaccacaagatgtagaacaatcaattgcacgtatagctcaaaaagctcgagcttgtggtatccatatgttagttgctacacaacgaccatcagtgaatgtaatcactggtcttattaaagctaatatacctactagaattgcatttatggtttcatcgagtgttgattctagaacgattttagacagtggtggcgctgaaagattattaggttatggtgatatgctttatttaggtagcggtatgaataaacctatacgtgttcaaggtacatttgtttcagatgacgaaatagatgaagttgttgactttattaagcaacagcgtgatcctgaatatttatttgaagaaaaagaattattaaagaaaacacaaactcaagcacaagatgatttatttgatgatgtatgtgagtttatggttgaagagggacatatttctacttctcttatccaaagacatttccaaattggttataacagagcggcaagaattatcgatcagctagaacaattaggatatatttcaggtgctaatggttctaaaccaagggatgtttatattacagaagcggatttaagtaaagaataa

SEQ ID NO: 7173 - DNA, 597 bp, Staphylococcus epidermidis
atgaacttattttacaatcctaaaggtgttggagatgttgcatttattcaaattgaaccttcagttggtccttttgaatatgaacaaaaacatggtgtggtagaaatcaaaaaagaaaatgaggtagtaggttataatatatttaatgtgtctaataatgtgacaataaatgataatggacatattaaactaactactgaattaatcaaagatttacaacaactgattactgaagcaggttttgattatcaacttgatactgatgtatcgcctaaatttgtagttggttacgtagaaactaaagaaaaacaccctaatgcagacaaactaagtgtgttgaatgtaaatgtcggtactgaaaaacttcaaattgtttgtggggctccaaatgtagaatctggtcagaaggtcgttgttgcaaaagttggggccgttatgccaagcggaatggtaattaaagatgcccaattacgtggggtagattctagtggtatgatttgctcaatgaaagaattaaatttgcctaatgctcctaaagaaaaaggaattatggtacttaacgatgactatgatattggtcaggcattttttgaataa

SEQ ID NO: 7174 - DNA, 855 bp, Staphylococcus epidermidis; identical to SEQ ID NO: 4509

SEQ ID NO: 7175 - DNA, 312 bp, Staphylococcus epidermidis; identical to SEQ ID NO: 4508

SEQ ID NO: 7176 - DNA, 1086 bp, Staphylococcus epidermidis
atgactattgataactcaaaaacattggaacgaattaaaatattaacagagcttcatggagcacctggttttgaagatgaagtgagaagttatatgaaaagtgaaatggaaccatacgtggataagtttattcaaaataagatgggtggtttctatggtataaaaaaatcaaataaagaaaacgcacctcgagttatgatagcagcacatatggatgaaataggttttatgattactcatattaatgataatggaatgattcaatttacgaatttaggtggcgtggctaatgatatttggcaaggaaaaagattaaaaataaaaaatagatacggtaaagaaatcataggtgtagttgctaatattcctaaacattttagaacaggaaatgaaagcatacctcaaatcaaagatttaatgctagatattggtgcttcttcatcagaagaagtgcgcaatcggggtgtagaggtgggcgatacaatagttcctcacacaataatgactcagttgtcaaaaaacagatacagcgcgaaagcctgggacaatcgatatggttgtgtcttagctattgagatattagaattattaaaagacgttcaactagatgttgacttatatgttggtgccaatgtacaagaagaagttggacttagaggagctaaagctgccgcaaagcaaattgatcctgatattgcattcgttgtcgattgctcccctgcaaatgatatcaaaggtaaacaacaactttctggtgtgttaggggaggggactttaattcgtatcaaagatggtactatgatacttaaaccattatttagagattatctccttaagctagcagaagaaaatcagattgcatatcaatattatatatcaccaggtggtacagatggtggggagattcataaagaaaatgaaggtataccaacagctgttattggagtatgtgcgcgttatattcatagcactgatgcggtctttgatattagagattatttttctgcacgtcacttgctaaaagaaagtattattcatttaacaagtggacaaattcaacaattacaatatggaaaggaattttga

SEQ ID NO: 7177 - DNA, 315 bp, Staphylococcus epidermidis; identical to SEQ ID NO: 4506

SEQ ID NO: 7178 - DNA, 651 bp, Staphylococcus epidermidis; identical to SEQ ID NO: 4505

SEQ ID NO: 7179 - DNA, 792 bp, Staphylococcus epidermidis; identical to SEQ ID NO: 4504

SEQ ID NO: 7180 - DNA, 849 bp, Staphylococcus epidermidis
atgacaaaagtttttataaatggtgaatttgttaatgaagaggatgctaaggtttcatatgaagatcgaggctacgtgtttggggacggaatctatgaatatatacgggcatatgatgggaaattgtttaccgttaaagagcattttgaaagatttttaagaagtgctgaagaaataggactagatttaaattatactattgaggaattaattgaattagtacgccgattattaaaagaaaataatgtggtgaatggcggtatttatatacaagctactcgtggtgctgctcctcgaaatcattcatttcctacaccacctgtaaaacctgttattatggcgtttacaaaaagttatgatagaccttatgaagaattagaacaaggagtttatgccattacaactgaagacattagatggttacgttgtgatattaaaagtttaaatttattaggaaatgtattagctaaagaatatgctgttaaatataatgctgcagaggctatacaacaccgaggtgatattgtcactgagggtgcatctagtaatgtttacgcaattaaagatggagtgatatacacgcatccagttaataattttatattgaacggaattactcgccgtgtcataaaatggatagcagaggatgaacaaataccattcaaagaagaaacatttacagtagaatttcttaaaagtgctgatgaagttatcatttctagtacttctgcagaagttatgccaattacaaaaattgatggtgaaaatgttcaagacggacaagttggtactataacacgacaattacaacaaggatttgaaaagtatattcaatcgcatagtatttaa

SEQ ID NO: 7181 - DNA, 1410 bp, Staphylococcus epidermidis
atgtggaaagaaaaggttctagagtacgaaaatcaaatgattgaagatcttaaaggtttattatctatagaaagcatcagagatgattctaaagccactgctgatgcacctgtgggaccaggaccgagagaagctcttgattacatgtacaatttaggtaaaagagatggtttttcaacgcatgacgttgatcatatagctggtagaattgaagctggtaaaggagaagatgtattaggtattttatgtcatgtcgatgtagtacccgcaggcgatgggtgggattcaaacccattccaaccagtagtgacagacaatgcaattatagccagagggacactggatgataaaggacccaccattgctgcctattatgcagttaaaattttaaatgagatgaaggtagattggaaaaaacgtatacacattattatcggaactgatgaagaatcagattggaaatgtacagacagatatttcaaaacagaagaaatgcctaccttaggttttgctccagatgcagaattcccagcaatacatggtgaaaaaggtataacaacctttgatttagtacaaaatgaagtgacagaagatacagatgaacctgactatgagttattaaaatttgaatctggtcaaagatacaatatggttcctgattatgctaaggcagaagtgctcgtcaaagaaaatatgacagatgtcattcaaaactttgaaaactttttacaacaaaatcaactacaaggtgaaagtacagttgacagtggtattttaatattaacaattgagggtaaagcagttcatggcatggatccatctttaggtgttaatgcaggattgtttttacttaaatttttagcaagtcttaatctaaataaaagcgcaaaagatttcgtagaattcaatgagcgatacttatttgaatctcactttggtgaaaaaatgggtatgaagttccatactgatattatgggagatgtcactactaatatcggggttatcagttatgataaagaaaaagcaggcagttatggtattaatctaagatatcccgaaggatttaaatttgaagacgcaatcgatagatttagaagtgaaattaatgaactaggttttaatttagaacttggcaaagttcaaaaaccacactatgtcgataaaaatgatccatttgtaaaaacacttgtaaacgcatatagaaatcaaacaggtgatatgactgaaccatatacgattggtggaggaacatatgcgagaaatttagataagggtgtcgcatttggtgcgatgtttgcagattcagaagatttaatgcatcaaaaaaatgagtatataactaaaaagcaattgatcaatgcaacaagtatttatttagaagctatttacgctttatgtgtggaggattaa

SEQ ID NO: 7182 - DNA, 429 bp, Staphylococcus epidermidis
atgggaaaaagtactaatttatttaaaattgcattaggcattggtggtgcaattactgttgtagcattatcacgtaaagaaagtcgagataaacttaaacaagaatataataaatataaagaaaatcctgaatcatataaatctagcgctaaagatttagcaactcaaataggtaataaagctaatgaaacaattcaagaagttaagaagaaccctaaagactatgttgaacgtatcaaaagtaatcctaaagaatttttagaagaagaaaagtctaaaattattggcaaaaatgatcagacgcaagatgatattgaagaaggaaaatttgatgctgaaggcggcgcaactgtcaataacaatttaagagttgttactgaagatgacttaaaaaataataaaaatgcattacaagataaaaaagaataa

SEQ ID NO: 7183 - DNA, 693 bp, Staphylococcus epidermidis
atgagattagataaatttctagctaatatgggtgttggaacgcgatcagaagttaaacagttactcaaaaaaggatctgttaaagtcaaccaaaatatagttaagttacctaaacttcatgttaatcctaattctgatgagataatggtaaatgatgaagtagttagttatatcgacaaagtgtatatcatgttaaacaaaccaaaaggttatatttcagcgacagaggatgaggtgcatcctactattattgatttgatacctgaatatgcacatttaaatatttttccggtcggacgtttggacaaagatacagaaggattactccttgttacaaatgatggacagtttaatcatgaagtaatgaatcccaataagcatgtttcaaagacttatgaagtctattcaaaacacccaataactcaattcgatattgataaatttaaatccggaatagaattatcagatggaaaattaaagcctgcaattttaaagaaagttgataattatgtatcacatgtcactatttacgaaggaaaatatcatcaagttaaaagaatgtttcatagtatcgaaaatgaggtattagaattgaaacgcataaagattgctcaactagaactagatcataatttagatttgggtagttaccgtttgttaacacaaatagattttgataatcttaagaactaa

SEQ ID NO: 7184 - DNA, 1662 bp, Staphylococcus epidermidis
atgagtgaaagtaaagaaatggttcgtggaacctttttaattacaataagtattttaattacaaaagtattaggtgtcttatttattattccgtttactgctttaataggtggacaagccaacatggcaccttttacttatgcttatgcaccatacaatatagctatagctatagcaacagctggtgttccgcttgccgcgtcaaaatatgttgctaaatataatgcactaggtgcatataaggtcagtcagaagttttataaatcaagttttgtagtcatgagtattacaggaattgtaggtttcctagttttatatttattagcaccatacatagctgaactaaccttatcacgtaatactcatggtaatagtggatggacagtagctgatatcacttggattattagaataataagtatggtagttatatttattccagttctcgcaacttggagaggaatatttcaaggatacaaatcgatgggacctactgcagtgtcagaagttacagagcaaattgcaagaattgtatttattttagtaggtagttatttaacgctcaatgtatttggaggtacagttcttcaggcaaatggtattgcaacgtttgcagctgcaataggtgcaatcgcaggaatacttacattatggtattactggattaaaagaagaaaaaatattaaaaaaatggtcgactcagatacagcgaatctaaatgtttcatacgggaaaatgtataaagaaattattgcttatagtataccgtttgtcatagtaagtttgaattttccactatttaatttggtcgatcagtttactcataatggtgcgcttaaccttgtaggtgtcaaacctggtttgcaagatatattctttaacatgttaaacatgtctacaaacaaaatagtaatgattccaacatcattaagtgctggatttgctgtcagtttaataccatttataactaaaacctatgaagaaggtagatatgcagagatgcatcgacaaattagaacttcgattggagttttaatgttcattactgttccagctagtattggtatcatggcattagcgcaacctttgttcacagtattctatggttttgatccagttgttcacggtcacgatccaaatttcgatggaagtagattattattttattatgctcctgttgcaattttaatttcattattaagtgttacagcatcaatgttacagggtatcgataaacaaaaactaacagtttttgttattttaggatctgttttaattaaactgattctcaattatcctttaattatgttattacacacacctggcgctgtattaagtacagcaatagctttattatttgcaatttgttgcaatttctatattcttaaaaaatatgcaaactttaaatttagttacagttggatacatttagctaagattattctaatttcaatcatcatgatgattggggttgaggtgattttcttcattttaagattattcttggaaccaactagatttaattacttgattattgttgcaattggtgtcattgtgggagcaatcatttatggtggtattacaatcaagactaaattagctgatgaatttttaggtgatattcccgctaaaataagacgtaaagtgaagatgttgcgatga

SEQ ID NO: 7185 - DNA, 1263 bp, Staphylococcus epidermidis; identical to SEQ ID NO: 5140

SEQ ID NO: 7186 - DNA, 11079 bp, Staphylococcus epidermidis
atgaatctatttagaaaacagaaatttagtattagaaaatttaatataggtattttttcagcattaatagctacagtcgcatttttagctcatccggggcaagcaacagcatcagaactggaaccttctcaaaataatgacactacagctcaatctgatggagggttagaaaacacatctcagtctaatcctataagtgaggaaaccacaaatacattatctgggcaaacagtaccttcatctactgaaaataagcaaacacaaaatgttcctaatcataacgctcaaccaattgcaataaatactgaagaagctgaatctgctcaaacagcatcttataccaatatcaatgaaaataatgatacgagtgacgatgggttacatgttaatcagccggctaaacatcatattgaagcccaatctgaagatgtaacaaatcacacgaactcaaatcattcaaattcatcgattccagaaaataaagctacaacagaatcatcaagtaaacctaaaaaaagagggaaaagatcattagatacaaatagcggaaatgacacgacaagtacaactcaaaatacggatccaaatttaagtaatacaggtccaaatggcattaacactgtaattacatttgatgatttaggaattaagacaagtactaatcgctctcgacctgaggtaaaggtagttgatagtctaaatggctttacaatggttaatggtggtaaggtcggtttattaaatagtgtgttagaacgtacaagcgtgtttgatagtgccgatccgaaaaattatcaagcaatagataatgtcgtagccttaggacgtattaaaggaaatgatccgaatgatcatgatggtttcaacggtatagaaaaagaattttcagtgaaccctaattctgagataatattttcatttaatacaatgactgctaaaaacagaaaaggtggaactcaattagttttaagaaatgcagaaaataatcaagaaattgcttcaactgatattcaaggaggcggcgtatatcgtttattcaagttacctgataacgtacataggttaaaagttcaatttctacctatgaacgaaatacactcagattttaaaagaattcaacagctacatgatgagtatagatactattcttttatagatacaattggtgttaattctggttcacatctatatgtgaaatcaagacaagttaacaaaaatgtaaagaatggtaaagaatttgaagttaatactcgtatagagaataatggtaacttcgctgctgctataggtcaaaatgaacttacttataaagtaacactaccagaaaatttcgaatacgttgataattcaactgaagtttcatttgttaacgggaatgtgcctaattctacggtaaatccgttttcagttaatttcgatagacaaaatcatactttaacgtttagtagtaatggtttaaatttaggaagaagtgctcaggatgttgctagattcttgcccaataaaatactaaatattagatacaagcatagacctgtcaacatctcaacgccacgtgaagtgactttcaatgaagcaattaaatataagacattttctgaatattacattaacactaatgacaatactgttactggtcaacaaacacctttcagtattaatgtcatcatgaataaagacgatttatcagaacaggtcaataaggatatcatcccatcgaactatacacttgcttcttataataaatataataagttgaaagaacgtgctcagactgttctggatgaagaaacaaacaatacaccttttaaccaaagatactctcaaactcaaattgatgatttgttacacgaattacaaacaacactaataaatcgtgtgagtgcttcgagagaaattaatgataaagctcaagaaatgactgatgctgtatatgatagtacagaattaactactgaagaaaaagatacattagttgatcaaattgaaaatcataaaaatgaaatttctaataacattgatgatgaacttacagatgatggtgttgaaagagtcaaagaggctggattacatactctagaaagtgatactccacatccagtaacaaaaccaaatgcacgacaagttgtgaataacagagcagatcaacaaaagacgcttatacgtaacaatcatgaggcaactaccgaagaacaaaatgaagcgattagacaagttgaggcacattcatctgatgctatcgccaaaataggtgaggcagaaacagataccactgtaaatgaagctagagacaatggtacgaaattaatagctacagatgttccaaatccaactaaaaaagcagaagctagagcggcagttaccaacagtgcaaattcaaaaattaaggatatcaacaataatacacaagcaacattagacgagagaaatgatgctatcgcacttgttaatagatcaaaagatgaagcaattcaaaatattaacactgcacaaggtaatgatgatgtcactgaagcacaaaataatggaacgaatacgatacaacaagtaccattaactccagtgaaaagacaaaatgcaatagcaactatcaatgctaaagcggatgaacaaaaacgtttaattcaagcaaacaataatgcaacgactgaagaaaaagctgatgcagagcgtaaagttaatgaagcagtcataactgcaaatcaaaatattaccaatgcaactactaatagagatgttgatcaagcacaaacaactggaagtggtatcatatctgctattagtcctgcaacgaagattaaagaggatgcacgtgcagcagtagaagctaaagctattgcacaaaatcaacaaattaattcaaataatatggcaacaactgaagaaaaggaggatgcattaaatcaagtagaagcacataagcaggccgcaatagcaactatcaatcaagcgcagtcaactcagcaagtttctgaagctaagaataatggcataaatactattaatcaagatcaacctaacgcagttaagaaaaataatacaaaaacaatattagaacaaaaaggaaacgagaaaaagtcagcaatagctcaaacacctgatgctaccactgaagagaaacaagaagctgtcagtgctgtttcgcaagctgttaccaatggcattacccatatcaaccaagcaaattctaatgatgatgttgatcaagaacttagtaatgcagaacaaattattactcatactaatgtcaatgttcaaaaaaaacctcaagccagacaagcattgattgctaaaacaaatgaaaagcagagtgcgattaattctgataatgaaggcactatagaagaaaaacaaaaagcaattcaaagtttgaatgatgctaaaaatttagctgatgaacaaattacacaggctgcttctaatcaaaatgtcgacaacgccttaaatataggtataagtaatatcagtaaaatacagactaatttcactaaaaagcaacaagctagagaccaagtaaatcaaaagttccaagaaaaagaagctgagttaaattcaacacctcatgcaactcaagatgaaaaacaagatgcgttaactagattaacacaagcaaaagaaactgcactcaacgacataaatcaagcacaaacaaatcaaaatgtggatacagcacttactagtggaattcaaaatattcaaaatacacaagttaatgttaggaaaaagcaagaagccaaaactacgattaatgatattgttcaacaacataaacaaactatacaaaataatgatgatgctacaactgaagagaaggaagtcgcaaataatttagttaatgcatcacagcaaaatgtaattagtaagattgataatgctacaacgaataatcaaattgatggtattgtgagtgatggtagacaaagcataaatgcaattacacctgatacatcaattaaaagaaatgctaaaaatgatattgatattaaagcagctgataagaaaataaaaattcaaagaataaatgatgctacagatgaagaaattcaagaagcgaatcgtaaaattgaagaagctaagattgaagcaaaagataatattcaacgcaatagtactagagatcaagtaaatgaagcgaaaactaatggaataaataaaatagaaaatataacaccagcaactactgtgaaatctgaagctagacaagcagtacagaataaagcaaatgaacagattaatcatattcaaaacacgcctgatgcaactaatgaagaaaaacaagaggcaataaatagagtaagtgctgaattagcaagagttcaagcacaaataaatgcagaacatacaacccaaggtgtcaaaactatcaaagacgacgcgataacttctttatctcgaattaatgcacaagttgttgagaaagagtctgcaagaaatgcaatcgaacaaaaggcaacacaacaaacgcaatttattaataataatgataatgctacagatgaagaaaaagaggtcgccaacaatttagttatcgctacaaaacaaaaatcattagataatattaactccttatcttcaaataatgatgttgaaaatgctaaagtagcaggaataaatgaaatagctaacgttttaccagcaaccgctgttaagtcaaaagcaaaaaaagatattgatcaaaaactcgcgcaacagattaatcaaattcaaacgcatcaaactgctacaactgaggaaaaagaagcggctattcaattggcaaatcaaaaatcaaatgaagcaagaacagcaattcaaaatgaacatagtaacaatggtgtcgcacaagctaaatctaacggcattcatgaaattgaattagttatgccagatgcgcacaaaaaatctgatgctaaacaaagtatcgataataaatataatgagcaaagtaatactatcaacactacaccagatgcaacagatgaagaaaagcaaaaagcattagataaattaaaaatagctaaagatgcaggatacaacaaagttgatcaagcgcaaacaaaccaacaagtatctgatgcaaaaactgaggctatagatacgataactaatattcaagcaaatgttgcaaaaaaaccatccgctcgagtggaattagattcaaagtttgaggatttaaagcgtcaaatcaatgcaacgcccaatgctacagaagaagaaaaacaagatgcaattcaaagattgaatggtaaaagagatgaagttaagaatctaataaatcaagatagacgtgacaatgaagttgaacagcacaaaaatattggacttcaagaattagaaacgattcatgctaatccaactagaaaatctgatgcgctccaagagttacaaactaaatttatttcacaaacagagttaattaataataacaaagatgcaactaatgaagaaaaagatgaagccaaacgacttcttgagattagtaaaaataaaactataacaaatatcaatcaagcgcaaactaataatcaagttgataatgctaaagataacggcatgaatgagattgctaccataataccagcaacaacaattaaaacagatgcaaaaacggctattgataaaaaagctgagcaacaagttacaatcatcaatggtaacaacgatgcaacagatgaagaaaaagcagaggctagaaagctggttgaaaaagcgaaaattgaagccaaatctaatattacaaatagtgatactgaaagggaagtcaatggtgctaaaaccaatgggttagaaaaaataaacaatattcaaccatcaactcaaactaaaacaaatgctaagcaagaaataaatgacaaagctcaagaacaattaatccaaattaataacacgcctgatgcaaccgaagaagaaaagcaagaggcaacaaatagagtcaatgctggattagcacaagcaatacaaaatattaataatgcacatagtactcaagaagtaaatgaatctaaaacaaatagtattgctacaatcaagagtgtacaacccaatgtgatcaaaaaaccgactgctataaatagtttgactcaagaagctaataatcaaaagacgttaataggtaatgatggtaatgctactgatgatgaaaaagaggctgcaaagcaattagtgacccaaaaattaaatgaacaaattcaaaaaattcatgaaagtacacaagataatcaagttgataacgtaaaagcacaagctatcactgcaattaaattgattaatgcaaatgcacataaaagacaagatgccattaatattttgactaatctagctgaaagtaaaaaatcagatataagagccaatcaagatgcaactactgaagagaaaaatacggcaatacaatctatagatgatacgttagcacaagcacgtaacaatattaatggtgcaaatacaaatgcgttagtggatgagaatttagaagatggtaagcaaaagttacaacgtattgtgttgtcaactcaaactaaaacacaagctaaagcagacattgctcaagcaataggtcaacaaaggtcgacaatagaccagaatcaaaatgctacaacagaagaaaaacaagaagcccttgagagacttaatcaagaaacaaatggagtcaatgatagaatacaagcagctttagcaaatcaaaatgttacagacgaaaaaaataatatattagaaacaataagaaatgttgaacctattgtaattgtaaaaccaaaggctaatgaaataattagaaaaaaagctgcggaacaaacgactttaataaatcaaaatcaagatgcgacactagaagaaaaacaaatagcacttggcaaattagaagaagtaaagaatgaagcgttaaatcaagtatcacaggcacactcaaataatgatgtgaaaattgcggaaaataatggaattgctaaaatttctgaggtccatcctgagactataattaaacgtaatgctaaacaagaaattgaacaagatgcgcaaagtcaaattgatactatcaatgcaaataataaatcaactaatgaagaaaaatcagccgctatagatagagttaatgtagctaaaattgatgctattaacaatattactaatgctacaactacacaattagttaatgatgctaaaaatagtggtaacacgagtattagccaaatattaccaagtacagcagtcaaaactaatgcattagcagctctagctagcgaagctaaaaataaaaacgctataatagatcaaacaccaaatgcgacagcagaagaaaaagaagaagcaaataataaagttgatcgtcttcaagaagaagcagatgctaatatcctaaaagcgcacactactgatgaagttaataatattaaaaatcaagctgttcaaaatattaacgctgttcaagttgaagttatcaagaaacaaaacgttaaaaaccaattaaatcaattcattgataatcaaaagaaaattattgaaaatacgcctgatgcaacactagaagaaaaagctgaagctaatagattgcttcaaaatgtactaacttccacatcagatgaaattgctaatgtagatcataacaacgaggttgatcaagctttagataaagctagaccaaaaatcgaggaaattgtaccacaagttagtaagaaacgagatgttttaaatgcaatccaagaagcatttaattcacaaactcaagaaatacaagagaaccaagaagctacgaatgaagaaaaaactgaagcattaaataaaataaaccaattacttaatcaggctaaagtaaatattgatcaagcacagtcaaataaagatgtagatagtgcgaaaacacgtagtattcaagatatagagcaaattcaaccacatccacaaacaaaagcaaccgggcgtcacagattaaatgaaaaagctaaccaacaacaaagtactattgcaactcatcctaattcaacaattgaagaaagacaggaagcaagtgcaaaactacaagaagttcttaaaaaagccatagctaaaatagataaaggtcaaaccaatgatgatgtagaaaagactgtagtaaacggaatagctgaaattgaaaatatattacctgctactacagttaaagataaagctaaagctgatgtaaatgctgaaaaagagcagaaaaacctacaaattaatagtaatgatgaagcaacgactgaagaaaaattagttgctagtgacaatttaaatcacgttgtcgagacaacaaatcaagctattgaggatgcaccagataccaaccaagtgaatgtagaaaagaacaaaggtataggtacaattagagatattcaaccacttgtagttaaaaaacctactgccaaatctaaaattgaaagcgcagtagaaaaaaagaaaactgaaattaatcaaacacaaaatgcaactcatgatgaagtaagagagggtttaaatcagttaaatcaaattcatgaaaaagccaaaaatgatgtaaatcaatctcaaactaatcagcaagttgaaaatgctgagcaaaatagtttagatcaaatcaataacttcagaccagattttagtaaaaaacgtaatgcagtagctgaaattgttaaagcgcaacaaaacaaaattgatgaaatagagcaagaatttagtgctacacaagaggaaaaagacaatgctttacaacatttagatgaacaggttaaagaaatcattaattctataaatcaagctaatacagataatgaagtagataatgctaaaacttctgggttgaataacataactgaatacagaccagaatataataaaaagaaaaatgctatattaaaattatatgatgtttcagatactcaagaagctataattaatggttatcctgatgcaactgaagatgaacttcaagaagctaatagtaagttaaataaaatacttttagatgcaaaaaaacaaattggtcttgcgcacacaaataatgaagttgatgatatttataatgaagtttcccaaaaaatgaaaactattttaccacgtgtagatacaaaagcggtagcacgttctgtacttaatgcacttgctaaacaattgattaaaacttttgaaaatactgcagatgttactcacgaggaacgtaatgatgcgattaatcatgtaaaagaacaattatctttagtattcaatgccattgaaaaagaccgaaaagatatacaagttgcgcaagatgaattatttggattaaatgaattaaatagtatatttatcaacataactcaaaagccaactgccagaaaagcaattagtggtatggcgagtcaattaaacaactctatcaataatacgccatatgctacagaagaagaacgacaaattgcactgaataaagttaaggcgattgttgatgatgcaaatgaaaaaatacgagaagctaacactgatagcgaagtacttggaacaaaatcaaacgcaataacattgttacaagcaatcagtgcggatgtacaagttaaaccacaagcatttgaagaaatcaatgcacaagctgaaattcaaagagaacgaattaatggaaatagtgatgcgacaagagaagaaaaagaagaagctttaaaacaagttgatacattagtaaatcattcatttattacaattaataatgttaataaaaatcaagaagtttatgatactaaagacaaaacgattgaagctattcataaaatcaaaccaatatcaactatcaaaccacaagcattaaatgaaatcactattcaactagacactcaacgtgatttaataaagaataataaagagtctacagttgaagaaaaagcctcggctatcgataaattaattaaaactgcagcaagaatagccgaagcaatagataaagctcaaacaaatgaagaagttaaaaatattaaaaaacaaagtattgatgaaatttctaaaatactacctgttattgaaattaaatcagctgcaagaaatgaaattcatcaaaaagcagaagttattcgcggattaattaatgataatgaagaagcgactaaagaagaaaaagatatcgcattaaatcaattagacacaactctaacacaagcaaatgtttcaattgaccaagcattaacaaatgaagctgttaatagagctaaagaaatagcaaattctgaaattaataaaatttctgtcattgccattaaaaagcctgaagctatagcagaaattcaagaactagcagataaaaaattaaataaatttaaacaaagtcaagaagctactattgaagaaaagcaatcagctatcaatgaattagaacaagctttaaaatcagctattaatcatattcatcaatctcaaaataatgaatcagtgagcgctgcattaaaagaaagtatatctttaatagactcgattgaaattcaagcacataaaaaattagaagctaaagcatacattgatggatatagtgacgataaaattaatgacatatcttctagagcgactaacgaagaaaaacaaatatttgtaagtaaacttaaagcattaatcaatcgtacacataaacagattgacgaagctgaaacatttgtttcagttgaaacaattgtccgaaactttaaagttgaagcggataaattaaactcaattgtacgtaaaaaagctaaagcatcgaaggaaattgaattagaagcagaccatgtaaagcaaatgataaatgcaaatttaagtgctagtactagagtgaaacaaaatgctcgtacattgataaatgaaattgttagtaacgctttaagtcaacttaataaagtaaccacaaataaagaagttgatgaaatagttaacgaaacgattgaaaaacttaagtcaatacaaataagagaagataaaatattgagtagtcaacgttcatcaacatctatgacggaaaaatctaatcaatgttatagttccgagaataatacaattaaatctctaccagaggcaggaaatgctgataaatcactaccattagcaggagttactttaatatctggtttagcaatcatgtcctcacgtaaaaagaaaaaagataaaaaagtaaatgactaa

SEQ ID NO: 7187 - DNA, 312 bp, Staphylococcus epidermidis; identical to SEQ ID NO: 4496

SEQ ID NO: 7188 - DNA, 2418 bp, Staphylococcus epidermidis
gtgttgaattataatcataaggaaattgaaaaaaagtggcagaattactgggaagaaaataagacctttaaaacgaatgataatttaggacaaaagaaattttatgcattagacatgtttccttatccatctggtgctggtttacacgtaggtcatccagaaggatatacggcaacggatatcatctcacgatataaaagaatgcaaggttacaatgtattacatcctatggggtgggatgcttttggtttgccggcagaacaatatgctttagatactggtaatgatcctcgtgaatttacacagaaaaatattcaaactttcaaaagacaaattcaagaattaggatttagttatgattgggatagagaagtgaatactacagatcctgaatattataaatggacgcagtggatatttattcagttgtataataaagggttagcttatgttgatgaagttgctgtcaattggtgtcctgcattaggtactgttttgtcgaatgaagaggttgtcgatggggtatcagaacgtggcggtcatcctgtttatcgtaagcctatgaaacaatgggtactcaaaattacagaatatgctgatagattactagaagatttagatgagttagattggcctgaatcaattaaagacatgcaacgaaactggattggacgttcagaaggtgccaaagtaacatttaaaattgagcaatctgaccaaaatattgaagtgtttacgacacgaccagatacaatctatggtacttctttcttagttttaagcccagaacacccacttgtgaatgaaattacgacaagtgataaagaacaagaagtcaaattgtatcaaaatgaagcatcaaaaaaatctgatttagaacgtacggacttagctaaagaaaaaacaggtgtgtttactggaacatttgcaattaatccgctctctggcgataaattacctatttggatagcagattatgttttatcaacttacggtactggtgcagtaatggctgtgcctggacatgatgagcgagatcatgaatttgctacgaagtttaatttaccaattatcgaagttatagagggtggcgaagttcaaaaatatgcatacacaggtgaaggaaaacacattaattctggagaattagacggtctagaaaatgaagcggcaataagtaaagcgatagaattgcttgaatctaaaggtgctggtgagaaaaaagtcaattataaattacgtgattggttatttagtaggcaacgttattggggagaaccaattcctattatacattgggaagatggatcaatgactacagttcctgaagatgaattgcctttactacttcctgaaacagatgaaattaagccatcaggtaccggtgaatctccacttgcaaatatagatgcgttcgtaaacgttatcgatgaaaagacaggtatgaaggggcgccgagaaaccaatacaatgcctcaatgggctggcagttgctggtactatttacgttacattgatccacataacgaaaaaatgatagcagatcctgaaaaattaaagcattggctacctgttgatttatatattggaggcgtggaacatgcagtacttcacttattatatgcaagattctggcataaagtgttatatgacttaggtgttgtaccaacaaaagaaccattccaaaaactatacaatcagggaatgattttaggcgaaggcaatgaaaaaatgagtaagtctaaaggtaatgtgattaatccagatgatattgttgcatcacatggtgctgatacattacgactatatgaaatgtttatgggacctttagatgctgcgatcgcatggagtgaaaaaggtttagatggttctagaagattcttagatcgtgtttggagacttatcattactgatgaaaattcaatcaataaaaaaattgtagattctaacaatcattcacttgataaggtttacaatcaaactgtgaaaaaagtaacagaagattttgatacacttagttttaatactgcaatcagtcaattaatggtgtttattaatgagtgttataaaaccaatgaagtttacaaaccttatatcgaagggtttgtaaaaatgttatcgcctattgcaccacacattggtgaagaattatgggatcgattagggcatgaaaataccattacttatcaaccatggccaacatttgatgaaagtttattagtagatgatgaagttgaaatcgtagttcaagtcaatggtaaagttagagcaaaaatcaatattccaaaagatttatctaaagaagaaatgcaagacttagccttgtctaatgataatgttaaaatgagtattgaaggaaaagaagttaaaaaagttattgctgtacctcaaaagctagttaatatagttgctaaataa

SEQ ID NO: 7189 - DNA, 1215 bp, Staphylococcus epidermidis
atgaatatacctaaatcagtatggtggctagttataggtatggcacttaatataaccggcgccagttttttgtggcctttaaatacaattttcatgaaggaagaacttcataagagtttaacaattgcaggtatcgttttgatgattaattcatttggaatggttgtaggtaatttgttaggtggttctttgtttgataaacttggtggttacaaaacgattttaataggtacatttacgtgtttatgtagtaccacattactcaacttgtttcatggctggccatggtatgcaatttggttagtactacttggatttggtggcggaatgatagttcctgctatttatgcgatggcaggtgccgtttggcctaatggaggaagacaaacttttaatgctatctacttagcacaaaatataggggttgctttaggcgcggcattaggaggttttgtggctgaatttagtttcaattatatttttatggcaaacctcattatgtatgtactttttgccatcgtggcgattacacagttcaatttagagattaatgctaaatttaaaccacaagattcgatagatttaaaaagcaaagaaaataaaaaacgatttactgctatgatgctagtatgtgcaatgtttgcaatttgttggattgcatatattcaatgggaaacaacgatagcttcattcacacaatcaattaatatttcaatgtctcaatatagtgtattatggacaatcaatggaattatgattttagtagctcaacctttaataagaccaattattatcttattaaaaggtaatttaaaacatcaaatgtttgtaggtattttaatttttatgagttctttcctagtgacgagttttgcaaatcactttgctatatttgtagttggcatggtcattttaacttttggagaaatgtttgtttggcctgcagtaccaactatagcaaatcaacttgcaccagttggaaagcaagggcaataccaaggatttgttaattcagcatctacagtgggtaaagcatttggaccatttattgggggtatacttgtagatacatttaatatgagtatgatgtttattgggatgattatattattaagttttgcactgttatttttaagtttctatgataaagtgttacccaagaattttaaaaatcaacatcaatcaagaagacgacgaaatcagaatggtatttaa

SEQ ID NO: 7190 - DNA, 954 bp, Staphylococcus epidermidis
atgggtaactatttcccgtatgcctttgaagataaacgctatcacacatggaactatcatttaaaaaacaagtttggtcagaaaatatttaaggtcgcattagacggaggttttgattgcccaaatagagatggtactgtagctcatggaggttgcacattttgttctgcagcaggaagcggtgactttgcaggtaatagagctgaaccaattgaagttcaattcaaaaaaataaaagaacgtatgcatgaaaaatggagtgaaggtcaatatattgcatactttcaggcgtttacaaatacgcatgcacctgttgaagtactaaaagaaaaatatgaacctgtcttaaaagaagatggcgtcgttggtttatcaatcgcgacaagacctgattgtttgcctgatgatgttgtagaatatttagctgaacttaatcagcgcacttacttatgggtagagttgggcctacaaactgtgcatcagtcaacttccgatttaataaatcgtgctcatgatatgcaaacatactatgacggcgtaacaaaattacgcaaacataatataaatgtttgtacgcacataatcaacggcttaccaggtgaaaattatgacatgatgatggagactgctaaagaagtcgctcagatggacgttcaaggtattaaaattcatttattacacttgctaaaaggaacgcctatggttaaacaatatgaaaaaggtatgctcgagtttatgagtcaacaagattataccaatcttgtttgtgatcaacttgaagtattacccccagaaatgattgtgcacagaatcactggagatggacctatagatctaatggttggaccaatgtggagtgttaataaatgggaagtattaaatgaaattgataatgagcttgctagacgaaactcctatcaaggtaaaatgaacaagcagagtatacaatcatga

SEQ ID NO: 7191 - DNA, 564 bp, Staphylococcus epidermidis
atgaaactagaacgtattttacccttctctaaatcgttaattgattctcatattaatcataatagtattgtaattgatgcaacatgtggtaatgggaatgatactgcttattttgctcaacatgttccaaatggatttgtctatggattcgatatacaagaacaagcaattttgaatacgcacaaaaaaacaaaagattattcgaatgtaaaattaatccaatctggtcatgaaaatgctaaattgcacattcccgcccaacatcacggttgcatagatgctgctatttttaatttaggttatttaccgaaaggtaacaaagaaattgtcactaaacctgaaacaacaattatggctattaatgaaatctttgatatcttaagtattgaaggaattattatattagttatatatcacggtcatgaagaaggtaaagtagaaaaagaagcactacttgaatttttacaaaactttgatcaaaataaagctcatatattacaatatcaattcataaatcaaaagaataacgctccttttatctgtgctattgaaaaacgtaattaa

SEQ ID NO: 7192 - DNA, 402 bp, Staphylococcus epidermidis
ttggctaatagtgaaaagaacagggtttatggtattttacaattagagacattattcaaagagattgattcaatttttaatacaatcaaagaagaatatggaatgtctaaagagaaaattttgattttacttacacttttggaaaaaggctcaatgactttaaaggaaatggataaatatgttcatattaaaccgtataaacgtacacgtacttataataatttagttaatcttgagtggatttacaaagaaagacctcaagatgatgaacgtacagttattattcattttaatgacaagcaaaattctaaaaaagaagatttgttaaagtttattgatgactcaattaaaatcaagtctgaaccaatgcaatctagtttacaatctattttagcagtttaa

SEQ ID NO: 7193 - DNA, 828 bp, Staphylococcus epidermidis
atgtggaagtgggaaacagaaaatgacgcaaaaggcgttgttgtcattgctcataatattttagaacatacaggtagatatgcatatgttatcacgatgttaagacgaaatggttatcacgttatcatgggcgatttaccgggacaagggcaaacttcacgagctcaaaagggacaaatagatgattttaatacgtatcatgaaaatatattagagtggataaaaatagctaatgaatataaaattccaacatttgttttaggtgtgggactaggtggtctcatcattttaaatctgcttgagaaaacagaattacctattgagggtatcttgttattttcacctatgttagaactaaagagagactataaagggcgcaaaaataaattgatttctaatgttggtaaaatttctaaagatactagatttaaagttggtataactcctcaagatttaacacgtaatgatgaaattattgaagaaacagcaaatgatggactaatgcttaaaaaggtaacatatagttggtataaccttataaatgaaaagatgaaagaaacaatggatcatatcagagatattaaacctatttcagcattgataatgtatggtaccaatgataaaattttagaaactcaatctattaatgaaatgaaagataaattaaagtcgaaagagatgtactttaaagtttgggatggattatatcatgaaatacataatgaacctgaacgcgatttggtgatgagatatgttctatcatttttgaataatagtgtaaatactatgggttttatagtaaatgaagaggaaattgaagacatttaa

SEQ ID NO: 7194 - DNA, 1002 bp, Staphylococcus epidermidis
atgtcattatttaaagattttttcattgcgttatctaatcatacatatcttaataaaatagctaaaaagatgggacctcaaatgggagcaaatcgtgtagtcgcaggaaatacgattcatcaattaattgagactatacaatatttaaatgattataatatttcagttactgtcgactcattgggtgaatttgttaatactagagaagaaagcattaaagctaaagaagagattttagaaattatcgatgcaatatataacaataatgtaaaggcacatatgtcagtcaagataagtcaacttggaagtgagtttgatttaaatcttgcttatgaaaacatgagagaaattttacttaaagctgataagaatgggaagatgcatattaatattgatacagagaagtacgatagtctttctaaaattcaacatattattgatagattgaaaggtgaatttaaaaatgtgggtacagtcgttcaagcctatctgtatgaagccgatgatataattgataaatatcctgaattacgtttgagacttgtgaaaggtgcttataaggaagatgcgtcaatcgcttttcaatcaaaagaagaaattgacgcaaattatattagaattattaaaaaacgactactaaattcaaagaactttacatctgtggctacccatgacaatgaaataatcaaccaagtcaaacaatttatgaaagaaaatcatattgacaaagataaaatggaatttcaaatgttgtacggttttcgcacggaattagcacaaaaaatagctaatgaaggttatttttttacagtttatgtaccatacggtaatgattggtttgcgtactttatgagaagactagcagaacggcctcaaaacttgtcattagctataaaagaatttactaaacccaaaatcttaaaaaagctaaccttgggtataggtatatttgcaactttattgacgtctcttattcttggcattaaaagacataaaaaataa

SEQ ID NO: 7195 - DNA, 462 bp, Staphylococcus epidermidis
atgaattttgaaggtaaattagttggtaaggatttaaaaattgcgattgttgttagtagatttaatgattttattactacacgtttacttgaaggggctaaagatacacttattcgtcatgaagtagaagatacaaatattgatgtagcttatgtgcctggcgcattcgaaattccactcgttgcaaaaaaattagctcaaaaaggtgaatatgatgctgtgataacattaggatgtgtgattagaggcgcaacttcacattatgactatgtatgtaatgaagtagctaaaggtgtttctaaagcaaacgacatttcagatgctccggtgatttttggagttctaacaactgaaagtattgaacaagcagttgaaagagctggtactaaagctggaaataaaggttcagaagcagcagttagtgcaatcgaaatggctaatctaattaagcaaatcaattaa

SEQ ID NO: 7196 - DNA, 1182 bp, Staphylococcus epidermidis
atgcaattcgatacaattgagttggctatagaggctttaagaaatggagacagcattattgtagttgacgatgaagatagagaaaatgaaggagatcttgtagctgttacggaatggatggatgataataccattaattttatggctaaagagggtcgtggtctgatttgtgcaccaattgataaatctatagctgaaagattaaaactacaatctatggagcaaaataacactgatatttatggcacacattttactgtaagcattgattattataaaactactacaggaatcagtgcacatgaacgtacacaaacggctagagcactcatagatgaaaatactaatcctgaagattttcatcgtccggggcacttatttccacttatagcaaaagagaatggtgtgttaacacgtaatggtcatactgaagctgccgtagatttggcacggttaacaggagcacaaccagctggagtaatctgcgaaattatgaatgatgatgggacaatggctaagggtgaagatctccagtcatttaaagaacgccaccatttaaaaatgattactataaaaagtttggttgcttttcgtaaggctgttgaacttaatgttaaccttaaggcaaaggtcaagatgccaacagattttggtcattttgatatgtatggatttacaacggattatagcgatgaagaaatcgttgctattgttaaaggagatttaaaaagcaatcctaatgtacgtatgcattctgcttgtctgactggggatatttttcatagtcaaagatgtgattgcggggcacaacttgaagcgtcaatgaaatatattgacgaacatggtggaatgattatttatttacctcaagaaggtagaggaatagggttaattaataagttgcgcgcatatgagttgatagaaaaaggttatgatacagttactgcaaatcttgctcttggttttgatgaggatttgagagattatcatgttgcagctgaaatattaaagtattttgatataagtgaaattaacttgctcagcaataatcctaaaaaatttgaaggtttagaagattacgacattgagatcgtagatagaattgaacttatcgttccagaaacaccatataaccatagttatatggaaactaaaaaaaataaaatgggacatttaatatag

SEQ ID NO: 7197 - DNA, 633 bp, Staphylococcus epidermidis
atgtttacaggtatcattgaagaaataggtactgtacaacaagttcgctctgagcaatcagtaagaacgcttgaaattaaagcacaaaacattttagttgatatgcatattggtgattcaataagtgttaacggtgcatgtttaactgtgatagatttcactgactcaagtttttcagttcaagtcatcaaagggactgaaaacaaaacatatcttggaagtgttcaacgtaatacagaagttaatctcgaaagagccatgagtggaagtgggagatttggtggacatttcgtgttaggtcatgttgatgagcttggaacaatttctaaaatcaatgaaactgctaactcaaaaattatttctattaaaacaactaaaaatattttgaatcaaatggtaaagcaaggttctataactgtagacggagttagtcttactgtatttgatttacatgattatacttttgatatacatcttataccagaaacacgtcgatctactattctttcatctaaaaaagtaggcaacaaagtgcatttggagtctgacgtactattcaaatatgttgaaaacatcatgaatcaaaatcaatcgcagttaacagaagaaaagcttagagcatttggtttttag

SEQ ID NO: 7198 - DNA, 1032 bp, Staphylococcus epidermidis
atggatgatgctattcaactagcaaaaatggtaaatggacaaacaggtgttaatccaccagtaggatccgttgttgttaaaaacggtaggattgtaggtttaggtgcacatttaaaaaagggagataaacatgccgaagtacaagctattgaaatggcaggtttaaatacccaaggtgctaccatatacgtttcattagaaccttgcacacaccatggttcaacaccaccttgtgtggataaaatcattgaagcgggcatatctaaggtcatctatgctgttaaagatactactttagtaagtaagggtgacgagattctgagagaagctggtatagaggttgaatttcaatataatgaaaatgcagctgcattataccgtgacttttttactgctaaaagaaacgaagttccagaagtaactgtaaaggtctcatctagtttagatggtaaacaagcaacagactttaatgaaagtaagtggataacaaacaaagaagttaaagaagatgtttatcaattaagacatgagcatgatgcagttattactgggcgtagaaccattgaagcagacaatccattgtatacaaccagggttcctgatggaaagcatccgattcgagttattctttctaagaaaggtcaactcgattttaatcaacaaatatttaaagatactgcatcggagatatggatttacactgaaaatgaaaaattaaaaacagataaaagttttattaaaataataaatataagtaattgtgatacaacgacaatattacaagacttatatcaaagaggtattgggaaactgttagtcgaggcaggcccaaatattacatctcaatttctccaatccaaacatctaaatgaactcattttatatatagccccgaaattaattggtggttctggcaaacatcaattttataagactgacgaggtcattgatttgcctgaagcaactcaatttgaaattgttgattccaagttaattaatcaaaatttaaaattgaaattacgaaagaagtga

SEQ ID NO: 7199 - DNA, 1485 bp, Staphylococcus epidermidis
atgcgtgtagcaataataggtatgggaacagctggtgtaagtgtgttacgccaactcgttaaacatgaaaacttttctcaattaaaagtagatgtatatgacgatgatagaaatatgggccaaggtgttccatttcaaaatgatagtagcgaactacttattaacatgccatcaaaatccatgagcttaaatcttgatgatgatcaagagttttggaagtggtatcaaaatcagacggaatttaattttagtaatcctcaatatttgcctagatttgtatttggtcattatatgaagtcttatttatcttattataatgaccaatttgataatttaactattatcaatgataaagtacaagaaatttttacacaatgcgatgttgatgacacagatttaaaatatcatgtatgtacatgtgatgatgaaaaagaatggcgtgaatacgattatttatttttaacttttggaacttttagttaccatgacccttatgatttgaagggaactaaaggctatatacaaacgccgtatcctacatatcatacacttgataatgttaaagattcagatcgaatcgtgattattggaacagggttggctagtttagatgctgtgagatatgtagctgcacatcatccatctttacccattactatgacaagtcgttctgcagcattgccaagtgttagagggaaaatgactaaaattcagtttacgcatttaactaaatcacgatttaatggaattatgaaaaatcactttggtaatgtaccattagaaaaagtagtttcattatttttaaaagaatgtgaagattatggaatagattttaaaaaacttatttatcgtagaactggaaaccatgtcaaagacttggagtatgatttaaatcatgaagaagaaatggggatattccaaagtatcattgaacatttaaaagaaaatttaaactggatttggaatagtttgagcgttaaagatcaagaaacttttaatcgtaaatacactaaaattattcagttaaattctaatccaatgcctcctagaacagctcgtttacttatcaagttaatacagaataatgaacttgtcattaaaaaagggctagaagacatagtccataaaaataatcaatttatgttgaagtataacgacactacgcaaaattatgagttgtttgacatcgttattaatgcaacgggctctaaaacacatctttctcaattagatgaggatgatcaattaattttaaacttagaaaatagacaaattgttcaacgtcatcctatgggtggcattcaaattatcccagaaacaaatcaagtcataagccctagatatggaaccttaaaaaatgtgattgcaattggacaaatgaccaacggtgtcaataaacttagaaatggcgtaaagatgattgttaatcaagttgttgatacagtatctcaattatatataacacaggaaaatagaaataagtaa

SEQ ID NO: 7200 - DNA, 852 bp, Staphylococcus epidermidis; identical to SEQ ID NO: 4483

SEQ ID NO: 7201 - DNA, 216 bp, Staphylococcus epidermidis
atggattatgcacatttaaatctcgagcacttttttgcaagaaatgatgatttggatattattagagatcgatctgattttgtgatgattaataatttcaccaatgagatgaaataccgtgaaggtgaaattgaaggaactatagatttgaataaatactattataaaaatagatcacaagctgtaagtttcataatgatgaattataagaactaa

SEQ ID NO: 7202 - DNA, 480 bp, Staphylococcus epidermidis
atgtcatttgaggaagcatataaaaaatacaacaatatcatacattatttgttaaaaagttatcaaatcacttataattatgatgaattttatcaacaaatgctcattaaaatgtggcaacttacactcgattttgatgaacaacaatcttcttcttttaaatcttatctatttatacgcctaaaattctatcttatagatttatttagacaaaaagacaatacgcttaatatatgtagcattgacgccctttcagaactttctccgtcattttcaatcaacgaaatcgatttacttattaaagatatttcacaacagttacttccacgcgaacgagattggttaaccttatatttacaaggatacaaacaatatgaaatttcccaaattttagatttttcacctacaacgattaaaaaaataaaatctaacgcaatacgaaaactacgtcgttatttaaattcatctacaaaggattga

SEQ ID NO: 7203 - DNA, 444 bp, Staphylococcus epidermidis
atgaaatgtatatcaacgcattcacttttatatattcaaactgcgttttcaacaaatgttgaaacctatattcagtatgaacattacgctattcatttaccatgtacacctgaaaaaacattacattatttattggaattacatcaaaaatcctatcataatcaatgtatgttatctaaaaatattttaaacattaaaaaattcatacctatctatattaatgaggaaaccatattatttccagttacgcaaaaacgtgcaccgattaaatattttatcaatgcacgaaatattataggaattcattcttcaattcataccacaatgattgtttttgaagatggtacgactatcgaactgaacatcccctatacacttgtaacaaaaaaatggcaagaaagtcttaccgtaggtcatatcatagagaaaactaccttttattaa

SEQ ID NO: 7204 - DNA, 444 bp, Staphylococcus epidermidis
atgagtaaaaatgaattcatcaaaagagtaaataagcaattatggtttttaaatgctaaagagaagaatgcgcttaacaaatatattgactcagttgatcagaataaaagtattgataccaataagccaataagattttcaaatgaatatttaaagaaatttatatttaatcataagaaaaaatcgacttctcatgtgttcgtacttttaatttgtatggttttagcttatgcatttttgctcggactctttattttagggttagtggccagcttagctattgtgcatgcctatatcaacccaaatattgatttatcagtttttgttatgttaactgttttgattgtcgcgataattataatgattgctagtttatatgctattaaacatacgactgcattgtttactaagaagcttttagaatataaatttaataaaaggtag

SEQ ID NO: 7205 - DNA, 714 bp, Staphylococcus epidermidis
atgacaaaattaaatgttaaagtgtttgcggatggtgcagatattgaagaaatgaaatcagcatataagaatcaactcgttgatggttttacaacgaacccaagcttgatggctaaagcgggtgtaactgattataaagcttttgcagaggaagtggttagtgaaatacccgacgcttcaatttcttttgaggtgtttgctgacgatttacctactatggaaaaagaagctgagattttaaaacaatatggtgataatgtatttgtaaaaattcctattgttacaacaactggtgagtctacactaccattaattaaacgtttatcatcgaaacaggtaaggttgaatgtcacagctgtctatactatagagcaagtaaaagcaattactgacgctgtgactgaaggtgtgccaacatatgtgtcagtatttgcaggacgcattgcagatactgggattgatccacttcctttgatgaaagaatcagttaaggtcactcatagtaaagaaggtgttcaattattatgggcaagttgtcgtgaagtatataatgtaattcaagctgatgaaattggagctgatattattacttgcccagctgatgttgtaaaaaaggttaataacaatttaggccgtgatataggagaactttcagtagatacagtcaaaggttttgccaaagacattcaaagttccggtttgtcaattttataa

SEQ ID NO: 7206 - DNA, 309 bp, Staphylococcus epidermidis
atggctcggtcaaaaaagtacttttatcttagtctattaatgataattttaagttttttctttaataccaataattcattattgagtaatatatttcaatcgtttatgaaaattgttgtagttacaagtatcgttaatattataatacttattttatcgattgtttttgccgataaatctataaagtatgctaaggaaagttcagattggattagatttgcaagcaaaatattaccattgattattttaatcactgttattatccatattctttcatctttacatacttttggttacatttttaaataa

SEQ ID NO: 7207 - DNA, 366 bp, Staphylococcus epidermidis
atgcaatatctatatatttttgtaggtggtgctttaggtgcattgataagattctgtttatcaatgcttaatgaaggttcaaccattccgttggggacatttgttgcaaatttattaggtgcttttttaatgggtagtatcggcgcattaagcctttcactttttaaaactcatcctaacataaaaaaagggcttactactggtttacttggtgcgttaactaccttttcaacatttcaatttgaacttgtaacactatttaatcagcatcattttatactatttactatatatggtgtgacgagttatattctaggaatactaagttgttacctcggtgtcaaaataggaggtagattttcttga

SEQ ID NO: 7208 - DNA, 354 bp, Staphylococcus epidermidis; identical to SEQ ID NO: 4475

SEQ ID NO: 7209 - DNA, 402 bp, Staphylococcus epidermidis
atgttacatgtccatattttaagttgggtattagcaattattttatttatcgcaacttatttaaattattcacaaacgcaaggtgcatcaccttattataagcctttgcatatggcattaagattattcatgctattaacattaatttctggtttttgggaattaatcgaagagtttatggctgcctctaatggtgaaggtggaaatcatatgctacttactttaaaaatgttatgtggtttagctgttatcgcatttatggaaatttctattgctaaaagaaaaaaacaacagactagccataaattcttttggattactattattttaatcataataacaatggctattggtgttattttaccttggggtccaatttccaaaatatttggaataagttaa

SEQ ID NO: 7210 - DNA, 906 bp, Staphylococcus epidermidis
atgaaatttctatcattcaaacataatgacagaacttcatatggtgttaaagtaaaacgtgaagatgctgtttgggatttaccaatggtttttgctgagtttggggacaaagactttaatcctaaaactttaattgcaggtttacagcaaaatcaaactttagactttcaagagcaagttcgaaaagcagttgtcgcagcagaagaaagtggaagagatgaggaatttaaacttttattcactgatattgattttctaccaccagtgacacctcctaataatgtgattgcatttggtagaaattatgaagatcatgctagtgaattaaatcatgaagttgatagtttatacgtatttactaaagcggcttcatctttaactggtgatgaagcaacaattcctaatcataaagatattacagaacaattggactatgaaggcgaacttggaattgtaattggaaaatcaggcgaaaagattcctagaggattagctttagattatatttatgggtacacaattatcaatgatattacagatcgtactgcgcaaagttcacatgatcaagcattcttatcaaaaagtttaactggggcatgcccaatgggcccttatatagtaaccaaagacgaattacctgcgccagagaatgtaaatatcgtaacaaaagtgaataacgaaattcgacaagatggcaacactggtgagatgattttaaaaatagatgaactcatcgaaaagatttcaaaatatgtagctttacatccaggcgatatcattgcaactggtacacccgctggtgtgggtgctggtttacaaccaccacaatttttacaaccaggtgatgaagtcaaagtaactatagataatattggcactttaacaacatatatatctaaaaattaa

SEQ ID NO: 7211 - DNA, 3657 bp, Staphylococcus epidermidis
atgattccaactaaacctcatgatgtgatttggacagatgcacaatggcaaagtatttatgcgaaaggacaggacatacttgttgctgctgcagcaggttccggtaaaacagccgttctagttgagcgtattatacaacgtatactaagagatgatgtagatgtagatcggttactagttgtaacatttacgaatttaagcgcacgtgagatgaagcatcgagttgataaacgtatacaagaagcatcttttaaggatcctaacaatgaacatttaaagaatcagcgaatcaaaattcatcaagcacagatttctactttacacagtttctgtttgaaattgattcagcagcattatgatgtattagatatcgatcctcattttagaacaagtagtgaagcggaaaatatattattattagaacaaactattgatgatgttttagaacaacactatgataaattagatcctcactttatagaattaaccgaacaactatcatcagataggaatgatgatcaatttagaagtattattaagcagttatattttttcagtattgctaatcctcaaccatttgaatggctcaatcaattagcgcaaccatacaaagaagaaaataaacagcaacaattaatgcagcttatcaatgatttagcaatgatttttatgaaagcaggatatgaggaattacaaaaaagttatgacttattctcaatgatggaaagtgttgataagcagcttgaagttattgaaaccgaacgcatgtttattactaaagctattgaaggtaaagtattaaatacagatgttatcacgcaacatgaatttatgagtcgttttccggcaataaatagcaagataaaagaagcaaatgaaggcatggaagatgctttaaatgaagcaaaacaacattatgataaatataaatctttagttatgaaagtaaagaatgattatttttctagaaatgcagaagatttgcaaagagatatgcaacaactcgcacctcgagtggcttatttagctcaaatagttcaagatgtgattcaatcatttggtgttcaaaaacgaagtcgtaatattttggatttttcagattatgaacattttgcattacgcattcttactaacgaagatggctcaccttcgcgtatcgctgaaacgtatcgtgaacattttaaagaaatcctagttgatgagtatcaagatactaatagagtgcaagaaaaaatattatcttgtattaaaactggtgaagaacacgatggtaacttgttcatggttggggatgtgaagcagtctatttataaatttagacaagctgatcctagtttatttattgaaaaatataatcgcttttctagtagtggaaatgaaagtggcttgcgcattgacttatcgcaaaactttcgttcgagacaggaagtgttatctacaaccaattacttgttcaaacatatgatggatgaacaagtaggagaaatttcatatgatgatgcagcgcaattgtattttggtgcaccatatgacgaagtttcacatcctgttcaattacgagcacttgttgaggcaagttcagaaaatagtgacttaactggaagtgaacaagaagcgaattacattgttgaacaagttaaagatattattaatcatcaaaacgtatacgatatgaaaacaggtcaatacagaaaagcaacatataaagatatcgtaattttagagcgaagttttggtcaagctcgtaatcttcaacaagcttttaaaaataatgatatcccttttcacgtaaatagtaaggaagggtattttgagcaaactgaagtacgtcttgtgctttcatttttaagaacaatagataatccacttcaagacatttatttagtgggattgatgcgttctgtaatatatcaatttactgaagaagaattagctgaaataagagttgtaagccctcatgatgattacttttatcaatctataaaaaattatatgattgatgaaaaagctgattctagattggttgacaagttaaatcgttttattcaggatatacaaaaatatcaaaattatagtcaaagtcaaccggtttaccaattaattgataaattttataatgatcattttgtaattcagtactttagcggtcttattggaggtaaaggtagaagagcaaatctgtatgggctatttaataaagctgttgaatttgaaaattcaagtttcagaggtttattccaatttattcgttttattgatgagcttattgatcgtaaaaaagattttggtgaagaaaatgtcgtaggtcctaacgataatgtggttagaatgatgacgattcacagtagtaaaggattagaatttccatttgtaatttactcaggattatctaaaaaattcaacaaaggtgacctgaatgcaccagttattctaaatcaacaatatggtttaggtatggattattttgatgtaaataaagatatggcttttccttcacttgcctctgtggcatatagagcaataaatgaaaaagaacttatatcagaagagatgcgtttaatctatgttgcgttgacacgagcaaaagagcaacttattttagttggaagagtcaaagatgaaaagtcgttaattaaatatgaacaattagctgtttcagacacacatatagcagttaatgaacgccttactgctaccaatccatttgttctaatttatggtgttttggctaagcatcaatcgccttcattgctaaatgatcaaagatttgaaagagatattgatcaattaaattctgaagtgaagccacgtgtatcaatagtgattgatcattatgaggatgtttcaactgaagaagtagtcaatgataatgaaataagaacaatcgaagaattaaaggccataaatactggtaatgaagatgtgaaaattaaaattcatcaacagctttcttatgactatccttttaaagttaacacgatgaaaccatctaaacagtcggtatcagagttaaaacgtcaattagaaactgaagaaagtaatacaaattatgatagagtacgtcaatatcgtattggtgttgcatcatatgaaagacccaagtttcttacccaaacaaaaaaaagaaaagcaaatgaaatagggactttaatgcatacagtcatgcaacacttaccttttagagaacaacgtttaacaaaagacgaattatttcaatatatcgatcgattgattgacaaacaacttattgatgaagatgcaaaagaggatattagaatagatgagattatgcatttcattgatggccctctctatatggaaatagctcaagctgacaatgtttatactgaattaccttttgtggtaaatcaaattaaagttgatggacttacaagtgaagatgaagatgtatccattattcaaggtatgattgatttaatatatgaaagtgacggacaattttactttgttgattacaaaacagatgcttttaatagaagaaaaggtatgagtgatgaagaaatagggaatcagctcaaagaaaaatatcagatacaaatgacgtattatcgaaatactttagaaaccatacttaaacgacccgtaaagggttacttatattttttcaaatttggtacattagaaatagatgattaa

SEQ ID NO: 7212 - DNA, 3480 bp, Staphylococcus epidermidis
atggaatttaatacatatattggtcgagcaggtacaggaaagtcaacagccatgcttaatcaaataaaaaataaaatgaagcaagacccgctgggtgatcctatagtattaattgcacctactcagagtacttttcaattagagcaagcatttgtaaatgattccgaacttcatggtagtttgagaactgaagtacttcactttgaaagattgagtcatcgtgtttttcaagaagttggtggtttgacagagcaacgattatctaaggccgctttagaaatgatgattttccatattgttcaacaacatgagtctgatttgaaattgtatggttcacaagctcaatactatggtttaagcgaaaagttagctgagcaaattcaagattttaaaaaatataatgtcactcctgaacacttaaatcaattgatagaaaatcattcaatacaaacgagaacaaaacataaattagaagatatttctcttatttataaacaattagaatcacgaatgaatggtgaatttataacagcagaggatagtttgcaacaattcattgaaatactatctcaatctcagtggataaaaaaggctgaagtatttattgatggattccataatttttctacattggaatatagaattatagaagcacttgttcaacacgccaaacaggtgactgtattattaacgaccgatggcagccatcatccatttagtttatttagaaagccatctgaagttttatcacatttggaggatatcgctaatcgtttaaatataaatctaaataaaacatattttaatacattttatcgctataacaatgatgatttaaagaatcttgaaaatgggtttgatgcattacaatttacgcctaaacatcatcaaaatcatgttaaaatatttgaatcttcaagcatgagagaagaaataaatgaagtagctcgacgtattttaaaagatgtcagagaagcagattataaattcagggacattgctatattataccgtgatgaatcgtatgcatatctattcgagtcaatacttccttcatatgatataccatttaacattgatactaaaaagtctatgacacatcatcctatcatggaaatgttacgttctttattggaagttatacgttcaaattggcatattaatgcaatgttacgattatttaaaacgaatgttttaacgtctcaatttaaaagaagtagctatttaattgatttactggagaatttcgttttagaacgtggtatttatggtaaacgttggttagatgaagatatctttagtattgatcagtttagtagaatgggacgtaaatcacatcaactaactgaaggacatcaagcattatacaaagaagtaattaaacttaaaaagaatgttataaataaagtgttatatttcgagcaagctatgaatgaagcgcatactgttaaagattatgctacgtcattttatgaaagtttggaatattttgaactaccgagtcagttaatgactcaacgtgatgaattagagttagcgggtctaacagaaaaagccgaagaaattgaccaagtatggaatggtttaatacaaattttagatgatttagttactgtatttgatgatcaggaaatgacacttcaacaatttttagatgtttttgatataggtttagagcaattagagtttgttatgatacctcaaactttggatcaagttagtatcggtacaatggatttagcgaaagttgataataaaaaacatatttatatggttgggatgaatgatggtatattaccacagactgtatcttcatcaagtttgattacagatgaagagaagaaatatgttgaggacaatgcacatgttgagttaagtccaacttcagatatactgcaaatggatgaagcgtttgtatgttacatcgctatgacaaggagtcaacaaagcgttactttttcatatagtttaatggggaattctggagatgagaaggaaattagtccttttttaacgcaaattaaagaattattttatgatttagaaatcaccaatctacaagatttacataaagcgcaaccattattaatgatgcaacattcacatcaaactaaaattcagctttttgaatatttaagaggttggttagaccatgaagacatcgattatcgttggttggatgcatatttagctattcgagacgatgatcaattaaatcaaggtttagattatcttactacgtcattgaaatatgataacgagactgtccaattaaatgaaattttatcacaacaactttatggtaaaactatcaacgctagtgtgtctcgttttgaaggttatcaacaatgtccttttaaacattatgcctcgcatggtttaagattaaatgaacgcactaaatatgaattacaaaattttgacttaggagatatttttcattcagttttaaaatacatttccgatcgaatttatggtgacttcaagaatttagatacaaagaatattcaatcacttactaaagaagcattagagcttattttacctaaagtacagtttaatttgttaaattcgtctgcgtattataaatatttatctaaaaagattggatcaatcgttgaaacaactttaaaggcacttaaatatcaaggggagtactctaaatttgtacctcaacgatttgaaacaggatttagaaaatcacctaaaaacaaaggtgaacttgttgcacaaccactgattaccaatcagggaattccgattaatataagaggtcaaatcgatcgtattgatacatatacaaaaggtgatcatagttatgtcaatatcattgattataaatcttcagaaagtagtgcaacactcgatttaacaaaagtttattatggtttgcaaatgcaaatgatgacctacatggatattgtattacaaaacaaggagcgtttaggtcttacagatattgtgaaaccagggggtctactttatttccatgtccatgaaccgcgtattaaatttaaaagttgggcagatatagatgaagaccaatttcaaaaagactatatcaaaaactttaaaatgagtggtttgcttaatcgtgaccaagaagtgttagacgctttagatattagacttgaaccaaagtataattcggatattgttccaatagcattaacagctaaaggcgctataaatcaacgtagtagtaaagtagctgatgaaaacatcatttatcaattaatagaacataataagaagaattttatcgagacagccagccacattatggatggacatacggaagtggcacccttgaagtacaaacaagtattaccttgtcaattttgtaattataaatcagtttgtcatgtagacggattaatagatagtaagcgttatagaacagtagatgaatcgataaaaccattagatttaattcaacaattaagaaatgaaggtggtgaaagacatgattccaactaa

SEQ ID NO: 7213 - DNA, 576 bp, Staphylococcus epidermidis; identical to SEQ ID NO: 2752

SEQ ID NO: 7214 - DNA, 522 bp, Staphylococcus epidermidis
atgaaacatttgattaaatatttgatttccttcacttttgcaattattattgtaatattcattcaatcatttataatcgtaggcgctgtgatatcaaataatagcatgacacctaccttgcaaacgggagatagagtaatagttaataaaattaaagtcacgtttgaccttattcaacgtggtgatataatcatgtacaggcataataaccaaacctattttagcagaattataggaaagcctggggagtctgtgagtattaaattacagcgtattaatatcgatgatagacaagtaaatgaaccatatatgaaagataggcatattaaagacattacattaagagaaattaagaattctgatggtgatacgattccaccgggagcattttttgttttaaatgataataataacaaacattctgattcaagaacctatggtttaatagataagaaagatatcattggagatgtcagtttaaaatattatccatttaaagaatttaactatcaatttaaataa

SEQ ID NO: 7215 - DNA, 576 bp, Staphylococcus epidermidis; identical to SEQ ID NO: 2750

SEQ ID NO: 7216 - DNA, 1332 bp, Staphylococcus epidermidis
atgactcacattcaattagactatggcaaaactttagaattttttgataagcatgaactagatcagcaaaaggatattgttaaaactatccatcaaactattcataaaggtacaggagcaggtaatgactttttaggttggttagatttacctgttgattatgataatgaagaattttctagaatcgtcgaagcatctaaacgtatcaaatcaaattccgatgtacttgttgttatcggtattggaggttcatacttaggtgcacgtgctgcaatcgagatgcttacatcttcatttagaacaaatacggaataccctgaaattgtatttgtaggtaatcatttatcctcaagttatacaaaagaattacttgattatttacaaggaaaagatttttcagttaacgttatttcaaaatcaggtactacgacagaaccagcagttgcatttagattatttaaacaattggttgaagaaaaatatggaaaagatgaagctaagaaacgtatttttgcaacgacagataaatctaaaggtgcacttaaacaattagcagacaatgagggttatgaaacgtttgttgtacctgatgatgtgggaggtcgttattctgttcttacagctgtaggattactaccaattgcaactgcaggtatcaatattgaatcaatcatgattggtgcggctaaggcacgtgaagagttatcttctgatgatttagatcaaaatatcgcatatcaatatgcaactattcgaaatattttatacagtaaaggttatactactgaaatgttaattaattacgaaccctctatgcagtatttcaacgaatggtggaaacaattatacggtgaatcagaagggaaagatttcaaaggtatttatccatcaagtgcgaattacacaactgatttacattccttaggacaatatgttcaagagggccgtcgtttcttattcgagacagtggttaaggtcaaccatccaaaacatgatatcaaaattgaagaggatgcagatgatttagacggactgaactatcttgctggcaaatcaatcgatgaagtgaatactaaagcatttgaaggtacattacttgcacataccgatggtggcgtaccaaatatcgttgtaaatattcctaagttagatgaagaaacatttggatatgttgtttatttctttgaattagcttgtgcaatgagtggatatcaattaggtgttaatccatttaatcaacctggagttgaagcctataaacaaaatatgtttgcgctattaggtaaaccaggctttgaagataagaaaaaagaattagaaaatcgtttataa

SEQ ID NO: 7217 - DNA, 1206 bp, Staphylococcus epidermidis
atgaaagataaaatcgttttagcatattcaggtggtttagatacaagcgttgcagttcaatggcttattgataaaggatatgatgtagttgcttgttgtcttgacgtaggcgaaggcaaagatttagacgttgtatatcaaaaagctttagatatgggtgcagtcgaatgtcatattattgatgcaactaaagaatttagtgatgattatgtaagttatgctattaaaggaaatttaatgtatgaaaatgcatatcctctagtttcagcattatcacgtccactcatcgcgaaaaaactggttgaaattgctgaaaaaacaaattctattggtattgcgcatggatgtactggtaaaggtaatgatcaagtacgtttcgaagtggcaatcaaagctttaaatcctaagttaaaagcatttgcacctgttcgtgaatgggcttggagcagagaagaagaaattgattacgcaatcaaacataatattcctgtttcaatcaattatgactcgccatactcaattgaccaaaacttatgggggagagctaatgaatgtggtattttagaagatccgtatgccgcacctccggaagatgcatttgatttaactacacctttagaagaaactccagacaatgcagacgaaattatccttacatttaaacaaggtattccagtacaagttgatggcaaagattatcaattagatgaccttattctttacttgaatcaacttgctggcaaacacggtattggtagaatcgatcatgttgaaaacagaatggtcgggataaaatcgagagagatttatgaaacacctggtgcggaagttattttaaaagcacacaaagcactagaaacaattacattaactaaagacgtagcgcactttaagcctgtcattgaaaaacaattttcagaacaaatatacaatggtttgtggttctcaccattaacagatagtttaaaactctttatcgatagtactcaacaatatgttgagggagatgtgagaattaaattatttaaagggaacgctattgtcaatggcagacaatctccttacactttatacgatgaaaaattagctacttatacaaaagaagatgccttcaatcaagaatcagcagtaggtttcattgatatttatggtttacctacacaagttaatgcattacttcacggggggtatagtaatgagcaataa

SEQ ID NO: 7218 - DNA, 1392 bp, Staphylococcus epidermidis
atgagcaataaagcttggggtggcagatttgaaactcaacccgaagaatgggttgatgatttcaatgcgtcaattgattttgataaaaatttaattaaacaagatgttcaaggtagtattgcacatgcaactatgctcgctaaacaacatattattacagatgatgaagctcaatccatcattaatgagcttaaaaatattcaaagtgactttgaagaaggtaaacttaaatttaaagcttctctcgaagatattcatcttaatattgagcacgagcttattcaacgtattggcgaagctggtggaaaactgcatactggtcgtagccgtaatgatcaagttgccacagatatgcatttgtatactaaagaacaagttcaatacattattgaacttatagcgtcgtttcaagaaacaattgttcaattagcagaccagcacgttgacacaattatgcctggatacacgcatttacaacgtgcacaacccatctcgttcgcacatcatattatgacttacttttggatgttagaaagagacaaaggtagattcatggatagtcttaaacgtatagatatctcaccattaggtgctgcagctttaagtggaactacacaccctatagatagacatctgactcaagaacttctaggatttgcaaatctgtatgaaaatagtttagatgctgtcagtgatcgtgactatatcgttgaaacattgcatcatatttcactcactatggtacatctatcacgttttgcagaagaaatcattttttggtcgactgatgaggcaaaatttatcactttatcagatgcgttttctactggctcatctattatgccacaaaagaaaaaccctgatatggctgaactaataagaggaaaagtcggacgtactacaggacacttgatgagtatgttagtaacacttaaaggcttaccattagcttataataaagacatgcaagaagataaagaaggtttatttgatgctgtacacacacttaaaggatctcttagaatcttcgaaggtatggttgcatctatgaaagttaattcaaaccgtttaaatcaaacagtaaaaaatgacttttcaaatgcaacagaattagcagactatttagtcagtaaaagtgtaccttttagaaccgctcatgaaatcgttggtaaaatcgtattaaattgtattcataaaggtatatacctattagacgtacctttaagcgaatatcaagaacatcatgagaatattgaggaagatatatatgattatttaacacctgaaaattgtctcaagcgtcgtcaaagctatggttcaactggtcaagaatcagtaaaacatcaactaaaagtcgcaaaagcattattaaaagacaacgaatcaaaatag

SEQ ID NO: 7219 - DNA, 1050 bp, Staphylococcus epidermidis
atgtttaaatctaagaaaataatcatttcaactttatctaccgttacactgggtttagctagtttaagttccccttcgatagctgaaacttcgaaccactctccagcaccaaaccaatcagagaaatcgatacaacaacaaacaaatattccatctaatatgaatcaatcatcagctaaaacatttaaacgacaagctgaatcagactcagtaagtggtaaaacaaacgatactcataatcattggactaaaaatttaactggagagaaatttacaaccattgcacatcgtggcgcaagtggttacgccccagaacatacttttgaagcatatgataaaagtcataatgaattaggagcatcttatatagaaatcgatttacaacgtactaaagatggtcacttggttgctatgcatgacgaaaaggtcaatcgtacaactaatggccatggacgtgtcgaccaacttactttaaaagagttaaaacaacttgatgcaggaagctggtttaatcgaaagcaccctgaatatgccaaaaataaatataaaaatgctaaagttcctactttagacgaaattttaaatcgctatggcaaaaatgcaaactattatattgaaactaaatcgccagatgtttatcctggcatggaaaaacaattattagatacattagataaacatgacttgttaacacaaaaatcacttaaacatggacatgtgatgattcaatcattttcagggcgtagtttagaaaaggtacatcacatgaacgccaatataccacttattagactaatgaataaatttgaacttaaaaaagctactaatcaagatttaaaaaatattaaatcttatgccattggagtaggtcctgaatacacagatttaaatattaagaacacaagacatttaaaaaatttaggatttttagttcatccttatacagttgatgatgaaaatcaaatgagaaacttaaatcaatatggtgttgatggtgtattcactaattttgctgatagatataaaaaagtttcagaaacacaacaataa

SEQ ID NO: 7220 - DNA, 1245 bp, Staphylococcus epidermidis
atgactgagaataataatttagtaacttccactcaagggattattaaagaagcattacacaagttgggctttgatgatggtatgtatgaccttataaaagaaccaattagatttttacaagtgcgcattccagtacgaatggacgatgggacagttaaaacatttactggataccgtgcacaacataatgatgcagttggccctactaaaggtggcgttcgtttccatccagaagttgatgaagaagaagtgaaggcattatcaatgtggatgactttaaaatgtggcattgttaatttaccttatggtgggggtaaaggcggtattgtttgtgatccacgtcaaatgagtatacacgaagttgagcgtctatctcgagggtatgtaagagctatatctcaatttgttggacctaacaaagatattccagcaccagacgtttttacaaactctcaaattatggcttggatgatggatgagtatagtgcattagataaatttaattcgccaggttttataacaggcaaacctattgtattaggtggatctcaaggacgtgatcgctctacagctttaggtgtagtcattgcaattgaacaagcggcaaaacgtcgtggcatggatattaaagatgccaaaattgtgattcaaggtttcggcaatgcaggtagtttcttagctaaattcttatacgatttaggtgctaaagtagttggtataagtgatgcatatggagccttacatgaccctaatggacttgatatagattatttattagatcgacgtgatagcttcggtacagttacaaatctattcgaagatacaatttctaacaaagaattattcgaattggattgtgacatccttgttcctgctgcaatttccaatcaaatcactgaagataatgcgcacgatattaaagcaagcattgttgttgaagctgctaatggccctacgacgcctgaagcaacacgtattttaacagaaagagatatattactagtgccggatgtacttgcaagtgcaggaggtgtgactgtatcttatttcgagtgggtacaaaataatcaaggttattattggactgaagaagaagtcaatgacaaactacgtgagaagttagtaacagcatttgatacgatttatgaattgtcacaaaatagaaaaattgatatgagattagcagcatatatagtaggtattaaacgtactgctgaagcagcaagatatagaggttgggcataa

SEQ ID NO: 7221 - DNA, 1191 bp, Staphylococcus epidermidis
atgactcaatctgaaaaaattattaacttaacaaatcactatggggcgcataactacgttccacttccaattgttatttctgaagcagagggtgtatgggtgaaagatccggaaggtaacacgtatatggatatgctttcggcctactcggcagtgaatcaaggtcatcgacacccaagaattattcaagcattgaaagatcaagcagataaagtcactttagtatcacgtgcttttcatagtgataatttgggtcaatggtatgagaaaatatgtaaactcgcaggtaaagacaaagcattgcctatgaatacgggagcagaagcggttgaaacagctttaaaagctgctcgtcgttgggcttatgatgttaagggtattgagccgaacaaagctgaaattatcgcttttaatggtaatttccatggacgtacgatggcaccagtatcattgtcttcagaagctgagtatcaacgaggctatggtccattgttagatggctttcgaaaagttgagtttggtgactttaatcaattaaaagcagcaattaataaaaatacagcagcaattttagtagaacctatacagggagaagcagggattaacgtaccaccagaaggatatttgaaaacaattagagaattatgtgatgaacatcaaattttatttattgctgatgaaattcaagcaggattaggacgttcaggaaaattatttgcaacggattgggattatgtaaaaccggatgtttatattttaggaaaagcgttaggtggaggggtatttcctatctcggtagttcttgcagataatgaggtattagatgtatttactcctggctcacatggttctacatttggtggaaatccactagcgtgtgcagtttctattgcagctatagatgtcattattgacgaggatttacctggtcgttcattagaattaggagaatattttaagtctgaattgaaaaaaattgagcatccatctattaaagaagttaggggacgaggattatttatcggtattgaattacatgaaagtgccagaccatattgtgaagctttgaaagaacaaggattattatgtaaagaaactcacgacaccgttattagatttgcacctccattagtgataacgaaagaagagttagacatggctttagagaagattaagagtgtatttgcatag

SEQ ID NO: 7222 - DNA, 285 bp, Staphylococcus epidermidis
atgaagaattatagttgggaatatttcaatgtccaaattaatcaaaagctttcagaacgaaaagcaaaaaccatctacagtcaaagaaaaattgatgtggagtctgtttttggaattatgaagcctattttgagtttcactcgaaagtccgttcgagggataaataaagacaaaagagaactaggacttgtgctaatgacacttaatataagaaaagtaccagctcaacgagctgaaaattataaaaaaatcataaaaaagacaatttttatattatttcaatag

SEQ ID NO: 7223 - DNA, 273 bp, Staphylococcus epidermidis
atgtataaagactataacatgactcaacttactctaccaatggaaacttcagttcttatccccacaaatgatatttcacgacatgtaaatgatattatagaaacaattcccgagactgaattcgatgaattcagacatcatcgaggtgcaacatcatatcatccaaaaatgatgttaaaagtagttttatatgcctacacacaatctgtgttttcaggacgtaagatagaaaaattacttaatgataatatccgaatgatgtggctatcataa

SEQ ID NO: 7224 - DNA, 1128 bp, Staphylococcus epidermidis
atgaataataaatatgaacctttatttaaatctttaacactacctaatggtgttgaagtaagaaatcgttttgttttagctcctcttacacatacttcatcaaatgatgatggaacaatttcagatatagaattaccttacattgagaaacgttctaaagatgtagggattgcaattaatgcagcaagtaatgttaatgatgtaggcaaagcatttcctggtcaaccttctgttgcacatgactcagatatcgaagggttaaaagaacttgctcaagttatgaagaaaaatggtgcgaaagcaatagtccaaattcatcatggaggtgctcaagctttaccagagttaacacctgatggagatgttgttgcaccaagtgctatttctcttaaaagttttggtcaacaagaagaacatgatgctcgtgagatgactgctgaagaaattgaacaaactattagagactttggtgaagcaactagaagagcaattgaagcaggttttgatggcgttgaaattcacggcgcaaaccattatcttattcatcaatttgtttctccttactataatagaagaaatgatgtttgggctgataactataaattccctgttgctgttatagatgaagttgttaaagctaaaaaagctcatgcaaatgatgattttattattggttacagattgtcacctgaagaagcggaatcaccaggtatttcaatggagataactgaagaattaattcaccaaatcgcaaataaaccacttgattatattcatgtgtcattaatggatgttaactcagttacgcgagaaggtaaatataaaggtgaaaatcgcttggaacttattcatcaatggataaatggacgtatgccacttattggtataggttctgtctttacagctgaagatgcactaaatgctgttgaaaacattggagttgaatttgttgcattaggtcgtgaaattctacttgattatgattttgttgctaaaataaaagaaggtcgagaagacgaaattataaatgcttttgatcctaatcgtgaagaccaacattatctaacaccaaatctttgggaacagtttaatcaaggattctatccattacctcgaaaagacaaataa

SEQ ID NO: 7225 - DNA, 381 bp, Staphylococcus epidermidis; identical to SEQ ID NO: 2740

SEQ ID NO: 7226 - DNA, 594 bp, Staphylococcus epidermidis; identical to SEQ ID NO: 5576

SEQ ID NO: 7227 - DNA, 381 bp, Staphylococcus epidermidis; identical to SEQ ID NO: 5577

SEQ ID NO: 7228 - DNA, 2406 bp, Staphylococcus epidermidis
gtgagtttgttacatattgcggtactattaccgttaatatttgcactcattattccattcctataccggttcgttaaacgtatacatttaggatggtttgtattacctgttcctattgtcttatttatatatttcatatcattgatttcaatgacgatgtcaggtaataacgtaatgaaaaacttaaattggatgccacatattggaatgaattttaatttatatgtggatggtctcggattattattcagtttgcttatcactggcataggaagtctagtggttttatattctatcggatatttaagcaaatcagaacaactcgggaatttttactgttatttattactatttatgggtgcaatgttaggagttgtactctctgataattttattattttatatttattttgggagttaacttctttctctagctttttattaatctctttctggagagagaaaaaagcttcaatttatggtgctcaaaaatctttaatcattaccgtattaggtggcttgagcatgctaggtggtatcattttactttccctagctactgatacttttagtattcaggctatgatttcaaaagcaagtgacattcaaaatagtcctttctttatcttagtaatgatactttttatgattggtgcatttacaaaatctgcacaagtgcctttttatatttggttaccagatgctatggaggcgcctacgccagtgagtgcataccttcattctgcaacgatggtaaaagcaggactatatctaatcgcaagaatcacacctatttttgcaatatccgaaggttgggtatggacaattacacttgttggtttaatcaccctattttgggcatcactcaatgcaacaaaacaacatgacttaaaaggtattttagctttctcaactgtgtctcaactagggatgattatgtctatgcttggtattggtgctgtaagttatcattatcaaggcgctaatagtcaactttatgttgctggatttgttgctgccatatttcatttaattaatcatgccacgtttaaaggtgcactatttatgattacaggtggtattgatcattcaactggtacacgtgatgttaaaaagttgggcggtttacttacaatcatgcctatctcattcacgcttacagttattacaacattaagtatggctggtgtgccgccttttaacggctttttatcaaaagagaaattcttagagtcaatgattaatgttacacatttaaatttaatgagtttaaatactttaggtattcttttaccaatcattgccattattggtagtattttcacatttgtatattcaattaaatttatattgcatatattctttggttcttataaacctgaagctctgccaaaacaagcgcatgaatcttcaattttaatgcttatttcacctatcattttaacatcactagttatagtattcggtttattcccaagtatattaacgcaatctattatagagccggcatctgtagcagttagtcaaacatcaaatataactgctgagttccatttattccatggtataactccagcattcctatcaacaataggtatttatattattggtattttattattaatttcatttagttattgggttcgtttattacaagcacatccatatcagttaacgttgaatcattggtatgacacttcaggccaacgtattccaggatattccgaaaatataacaaatagttatgttacaggtttttctagaaataatttggtgattatcttaggtattctcattgctttaacttttgttacagtcatcagtgtacccttcagtattgactttaaaaacgtgagtcatttacgcgtatttgaaggtgcaacagtattgtttttactgattgcttcaactttcattatatttgcaaaatcacgtttgtttagcattatcatgttaagcgctgtgggttacgctatatcagtattatttattttctttaaagcgcccgacttagcattaacacaatttgtagtggaatctatttctacagcattattcttactatgcttttatcacctacctaatttaaatcgctacaatgaaaaaccaacctttaaactgacaaatgctgtgatttcaattggagtgggattatcagtgattattttaggattaattggctatggtaatagacactttgactctattactaaattctatcaagaacatgtttttgatttagcacatggtaaaaatatggtaaatgtcatcctcgtagatttccgtggtatggatactttattcgagtcatctgtactaggtattgcaggtttaggcgtatatacaatgattaaattacgattaaaacagaaaaatcaatcaagtgaggtgaatgaccatgaatag

SEQ ID NO: 7229 - DNA, 429 bp, Staphylococcus epidermidis; identical to SEQ ID NO: 2736

SEQ ID NO: 7230 - DNA, 348 bp, Staphylococcus epidermidis; identical to SEQ ID NO: 2735

SEQ ID NO: 7231 - DNA, 1497 bp, Staphylococcus epidermidis; identical to SEQ ID NO: 2734

SEQ ID NO: 7232 - DNA, 480 bp, Staphylococcus epidermidis; identical to SEQ ID NO: 2733

SEQ ID NO: 7233 - DNA, 294 bp, Staphylococcus epidermidis; identical to SEQ ID NO: 2732

SEQ ID NO: 7234 - DNA, 357 bp, Staphylococcus epidermidis; identical to SEQ ID NO: 2731

SEQ ID NO: 7235 - DNA, 1155 bp, Staphylococcus epidermidis
atgcactggacaattattggtggtggcttacaaggaaccaccattgcacttaaattaaaaaatgaaggactaaaaaatgaggcgcttactatcatagatccttactcctcattatgtgagcgatttaatatttatacacaacgtattagtatgccatacttaagatcgcctttcgttcatcatattcatcctaaaccttttcatctcaaacaatatgctagatatcatcagtatacttcagcttattacggcccgtataaacgtcctcaaagagatatgtttatgcatcatgttcatgatttgatacatcaatttaaacttaatgattatcatatacaaggtaaagtcgaagctattaataaatcaagaggtaaatggtgtataaaactatcaactggcgataaaatgattaccgattgtgttgtgatagcaaatggctatacgcaaacgccattcatacctgaaattttcagaaataaagcgaatgtaaaacacatattcgctgataattatcatgcctctttagataaagatactcaacatgttgttggttcaggtatatctgctgcccacctcactttaaaattattaaatgaacacaatcaccaacttgttcatttatggatgaataaagatattgagatacatgattttgatgctgaccctggttggttaggacctaagaaattgaactatcttgcatctatatcctcatcagatgcaagaatgaagttaattgaagacgaacgtcatagtggttcaatgcctatggaattatttttaaggttaaagaaatatgtgcaaagtggtcgactcgtcatacatacgagtcaaattgatgatgtaactgaatcctatattatctccgctggaaaatattttgaatataagcatattttgttagctactggattttataatcaattgttaacacaaccactcataaaaaatcttattcaaaacgaacaagcaccacttaatcaatcaggttatccttctttgtcaaacgaactagaatggttaaatcaattattcgtagctggtggactcgcagatttagaactaggtccttttgcaagaaatataatgggcggtaaagaaagcgctgaacgcataagtaaagcatataaacgtttaaataagaaaatctcttaa

SEQ ID NO: 7236 - DNA, 375 bp, Staphylococcus epidermidis; identical to SEQ ID NO: 2729

SEQ ID NO: 7237 - DNA, 1317 bp, Staphylococcus epidermidis; identical to SEQ ID NO: 2728

SEQ ID NO: 7238 - DNA, 1482 bp, Staphylococcus epidermidis; identical to SEQ ID NO: 5588

SEQ ID NO: 7239 - DNA, 1209 bp, Staphylococcus epidermidis; identical to SEQ ID NO: 2726

SEQ ID NO: 7240 - DNA, 360 bp, Staphylococcus epidermidis
atgccaacagtcattttaactgaagcggcagcatttgaagttagagacatgttaaaaaataacgacatgtctgatggttatttaaaaattaaagtaaatggtggaggatgcacaggattaacttatggtatgtcagccgaagcagaacctggtgaaaatgatgaaattctcgaatactatggtttgaaagttctagtagaccgaaatgatgctcctgtattaaatggaacaacaattgattttaaacagtcacttatgggtggaggatttcaaataaacaatcctaatgctattgcctcatgtggttgtggaagttcatttaaaacagctaaagtcgctggaaatccagagcaatgttaa

SEQ ID NO: 7241 - DNA, 213 bp, Staphylococcus epidermidis; identical to SEQ ID NO: 2724

SEQ ID NO: 7242 - DNA, 1065 bp, Staphylococcus epidermidis; identical to SEQ ID NO: 2723

SEQ ID NO: 7243 - DNA, 321 bp, Staphylococcus epidermidis; identical to SEQ ID NO: 2722

SEQ ID NO: 7244 - DNA, 243 bp, Staphylococcus epidermidis; identical to SEQ ID NO: 2721

SEQ ID NO: 7245 - DNA, 1239 bp, Staphylococcus epidermidis; identical to SEQ ID NO: 2720

SEQ ID NO: 7246 - DNA, 237 bp, Staphylococcus epidermidis; identical to SEQ ID NO: 2719

SEQ ID NO: 7247 - DNA, 1215 bp, Staphylococcus epidermidis; identical to SEQ ID NO: 2718

SEQ ID NO: 7248 - DNA, 1458 bp, Staphylococcus epidermidis
atggcagacttaattaatattctaaaccacttcgttcaggaacaacctgaagcagttgcggttagacatacaaatgatgagttaacatataaacaacttgatgaagaatcaagtaagctagcacatctattacaagatagtaaaaagccaatgattttatatggtcacatgtcaccttacatgattgttggtatgattggagcgattaaatccggttgtggatatgttcctattgatacttctgttcccaaagaacgtgtgaatatgattattgataaagtacaaccggaaatcatttttaatacttcagatgagactttagaacagacaaatgcacaagtgcttaaggttagcgatattcaggattcccaatatccaattgtctttgatagtcaaatgaagcaaaacgatgtagtatatacaatttttacctcaggatctacaggagaacctaaaggtgtgcaaattgaatatgcaagtttaaatgaattcgcagaatggatggtatctttaaacaaaactggtactggtaaagaatggttaaatcaagcgccattttcttttgatttatcagtaatggcaatctatccttgtttaacatcaggtggtactttaaatcttgttgataaagatatgattaaaaaacctaaactattgaacgaaatgttagttcaaacaccaatgaatgtttgggtttctacaccttcttttatagaaatgtgtttattattacctaatttaaatgaacaacaatatagtagtttaaagcaattctttttctgtggggaaatcttaccacataaaacagctaaagccttagttgaaagatttccgaattcaatgatttataacacatatggaccgactgaagctactgttgcagtcacaagtatacaaatcacagaagaaattttaaatcaatataaccctttaccagttggtgtggctagacctggtacaaaattatttgctactgaagaaggagaacttgtcattgaggggcaaagcgtcagtttaggttatttaaagaatgaagaaaagacaactgcagtatttaattttgaagacggtgtcagaacatatcatactggggataaagctaaaattgaagatggattgtggtttattcaaggacgtattgattttcaaattaaattaaatggttatcgtatggaattagaggaaattgaaacacaattacgccagtcaaaacatgtaagagaggctgttgttgtgccggtttataaaaatggaaaggtcatacatttaataggagcagtagtacctactgaacctgtagaagataatttagcaatgacaactcatattaaacacgaacttaaatcacgcttaccagaatatatgattcctagaaagttcgaatggatggaacaactaccactcacatcaaatggtaaattagatcgtaagaaaattgccgaggttgtaaacggatga

SEQ ID NO: 7249 - DNA, 147 bp, Staphylococcus epidermidis; identical to SEQ ID NO: 2716

SEQ ID NO: 7250 - DNA, 972 bp, Staphylococcus epidermidis
atgaataaaatactcgtaacacgtcaaattccacaacactacgtagagcaacttaaaaaactaggacaacttgtcatgtgggaacacgatttaacgcctatgtctagagaatcatttcttgctaacgttgaagatgcaacagcatgtgtgatcacattgagtgagcatattgatgaagaagtatttctcagggcacaacaacttaaagtgattgctaatatggcagtaggttttgacaatattgatatttcattagcaaagaaacatggtgtagttgttaccaatacacctcacgtactgacagagacaactgccgaactagggtttacattgatgcttactgtagcacgtagaatcattgaagcgacatcatatattcaagagggtaagtggaaaagttggggaccctacttattatcaggaaaagatgtatacggtgcaactgttggtatttttggaatgggtgatataggaaaagcgtttgcacgtcgcttacaagggtttgatgcacggataatatatcacaatcgcaaacgtgacttaaatgctgaaagagatttaaatgctacatatgtaacgtttaaatctttacttgaacaaagtgattttattatttgcacagcacctttaaccaaggaaactgagaatcaatttgatgctcgagcttttaataaaatgaaaaatgatgctgtcttcattaatattggaagaggtgcaattgtagatgaggaagcacttttagaagcattaaaaaatcatgagatacaagcctgtggtttagatgttatgcgtcaagaacctattcaacctaatcatccaatactgaaattacctaacgctgtggtgttacctcacataggaagtgcatcccaagtcactagaaatcgaatggtacaactttgtatagataatattaaagcagtattaaataatgatgcaccaataacccctgtaacctctttacacttttaa

SEQ ID NO: 7251 - DNA, 780 bp, Staphylococcus epidermidis
gtgaaacattatcaggcatacttaatcgatttagatgggacaatgtataaaggcacagatgaaattgacggtgccgcacaatttatagattatttaaataataatcatatcccgcatctatatgtaactaataattctacaaagacacctgttcaagttactgagaagttacgtgatatgcatattgatgctaaaccagatgaagttgtaacttcagcattggcaacagcggattatatctctgaacagcatccaaatgcaactgtatatatgattggtggtcatggactcaaaactgcactaactgatgcaggactttcaataaagaatgatgaacatgttgattatgtagttattggtttagatgaaaaggtaacatatgaaaaattatcaatcgcaacattagctgtacgtaatggagctaaatttatatctacaaatccagatgtatccatacctaaagagagaggttttttacctggtaatggtgctattacgagtgtggtcagtgtctctactggcattcagccagagtttattggtaaacctgaaccaattataatgtctaagtctttagatatacttggattagaaaaatcagaagttgcaatggttggtgatttatatgacacagacattatgtcaggtattaacgtaggtattgatacgatacatgttcaaactggtgtgagtacgtatgaagatattcaatctaaagaaataccgcctacgtattcatttaaagatttaaatgtagctattgcagaattagaaaaataa

SEQ ID NO: 7252 - DNA, 435 bp, Staphylococcus epidermidis; identical to SEQ ID NO: 2713

SEQ ID NO: 7253 - DNA, 267 bp, Staphylococcus epidermidis; identical to SEQ ID NO: 2712

SEQ ID NO: 7254 - DNA, 390 bp, Staphylococcus epidermidis; identical to SEQ ID NO: 2711

SEQ ID NO: 7255 - DNA, 915 bp, Staphylococcus epidermidis
atggcgactagaaatgaagaaattttacgtaaaccggattggttaaagattaagcttaacacaaacgataattatactggtcttaagaaaatgatgcgtgagaagaatttacacacagtgtgtgaagaagctaaatgtccaaatattcacgaatgttggggtgcgcgtcgtacagctacatttatgattttaggagcagtatgtacaagagcatgtcgattttgcgcggtaaaaactggtttacctaatgaattagatttaaatgaaccagaacgagttgcagaatcagtagaattaatgaatttaaaacatgttgtaattactgctgttgcacgtgatgatttaagagatcaaggctcaaacgtgtatgcagaaacagtacgtaaagtaagagaaagaaatccatttacaacaatagaaattttaccatctgacatgggtggcgattatgaagcccttgaaacattaatggcttctagaccagacattcttaatcacaacattgaaacggttcgtcgcttaacaccaagagttcgagctcgagcaacttacgatagaactttacaatttttacgtcgttctaaagaattacaacctgatattccaacaaaatcaagtttgatggttgggttaggtgaaacgatggaagaaatttatgaaacgatggatgatttacgcgctaatgatgttgatatcttaactataggtcaatatttacaaccgtctcgaaaacatttgaaagttgagaaatattatacgccattagaatttggtaaaatgagaaagattgcaatggaaaaaggatttaaacattgtcaagcaggacctttagtaagaagctcatatcatgctgatgagcaagtgaatgaagcagctaaagagaaacaacgccaaggtgaagaacaactcaattaa

SEQ ID NO: 7256 - DNA, 1320 bp, Staphylococcus epidermidis; identical to SEQ ID NO: 5606

SEQ ID NO: 7257 - DNA, 828 bp, Staphylococcus epidermidis
atgttattaacaattattctattaatattaatagggggattatcagcgattttaggatctatcgttggtattggtggtggaatcatcatcgtccccacacttgtttatttaggcgttaaccatcatcttctacatggtattacgacgcaaattgcaataggtacttcttcagttattctgattgttactggattatcttcctcattaggatatttaaaaaccaaacaagtagatataaaaaatggttcgatatttctatttggactactacctggatctttggttggttcttttttaagtagataccttacacttgattcgtttaacttatactttggcgtgtttatgatatttgtgtcgatattactgatgattcgtcacaaaatcaaaccttttaaaatttttgacaaacctaaatatgcgcgtacatatgttgatgctgaagggaaaacataccgttatagtgtaccacccctgtttgcttttataacaacgttatttattgggctattaacagggctgtttggcataggtggaggtgcattgatgacccctcttatgctcatcgtctttagatttccaccacatgttgcagtaggcacaagtatgatgatgattttcttttcaagtgtgatgagttcaatagggcacatctttcaaggacatgtggcttggggctattctatcattctcattatttcaagtgttataggtgcacaaataggtgtgagggtcaatcgatctatgaaatccgacacagttgtaatgttattgagaacagtaatgcttattatgggtatatatttaatcattaaatcttttatttaa

SEQ ID NO: 7258 - DNA, 849 bp, Staphylococcus epidermidis; identical to SEQ ID NO: 2707

SEQ ID NO: 7259 - DNA, 1026 bp, Staphylococcus epidermidis; identical to SEQ ID NO: 5609

SEQ ID NO: 7260 - DNA, 126 bp, Staphylococcus epidermidis; identical to SEQ ID NO: 2705

SEQ ID NO: 7261 - DNA, 270 bp, Staphylococcus epidermidis
atggaattaaatggatatcgcgatgctttatacggtggtggtaaatctgctaaatccctgatgactaaaaaagatattaagatgagtaataaaattgccaatgcaatgaaaaggttagaaaaagttatagataactcacatgaaaaaattgacgccagagcaatacgagagtatgtcaataaatatccaattatcgagggtcaagttatacatatcaatagttgtcttgataatgatatttctggcacatatatttactacagtgcctga

SEQ ID NO: 7262 - DNA, 147 bp, Staphylococcus epidermidis; identical to SEQ ID NO: 5612

SEQ ID NO: 7263 - DNA, 1398 bp, Staphylococcus epidermidis
atggcaaaacaagcacctgatgttggggattataaatacggattccatgacgaagatgtttccatttttagatcagagcgtggtttaacggaaaatatagtaacagaaatctctaaaatgaaagaagagccacaatggatgttagatttccgtttgaaagcattaaaactattctataaaatgccaatgccacaatggggtggagatttatctgaattagattttgatgatattacgtattatgttaaaccttctgaacatactgaacgttcatgggatgaagtgcctgaagaaatcaaacgtactttcgataaattaggtattccagaagctgagcagaaatacttagctggagtttctgcacaatatgaatcagaagttgtttatcataatatggagaaagaactggaagaaaagggtattattttcaaagatactgatagtgcattacgtgaaaatgaagagttatttagagaatattttgcgtcagtggtacctgctgcagataataaatttgctgcattaaattcagcagtatggtctggtggttcattcatttatgttcctaagaatgttaaattagatacaccactacaagcatatttccgtattaactctgagaatatgggacaattcgaacgtacattaataattgctgatgaaggtgcatcagtaaactatgtagaaggttgtactgcacctgtatactctacaagttcgctacactcggcagttgttgaaattatagtacacaaagatgcacatgtaagatatactactatccaaaactgggctaataacgtatataatttagtaactaaacgtacctttgtccatgagaatggtaatatggaatgggtagatggaaacttaggctctaagttaacgatgaaatatccaaactgtgtacttttaggtgaaggtgccaaaggtagcacattatccattgcatttgctggtaaaggtcaagttcaagatgctggtgctaaaatgattcataaagcacctaatacatcttcaactattgtttctaaatctatctccaaaaatggtggtaaagtcatttatcgtggtatcgttcattttggacgtaaagctaagggagcacgttcaaatatcgaatgtgatacattaattttagataatgaatcgacttcagatactatcccttataatgaagtgttcaatgacaatatttcattagaacatgaagctaaagtttctaaagtatcagaagagcaattattctatcttatgagtcgtggtatttctgaggaagaagcgacagaaatgattgttatgggattcattgagccgttcacaaaagaattaccaatggaatacgcagtagaaatgaaccgtttaattaagtttgaaatggaaggctcaattggttaa

SEQ ID NO: 7264 - DNA, 465 bp, Staphylococcus epidermidis; identical to SEQ ID NO: 5614

SEQ ID NO: 7265 - DNA, 1242 bp, Staphylococcus epidermidis
atggccgaacattcttttgatgtcaaggcagtcattaaagactttccgatacttgagcaaaaggtaaataataaacgtttagcataccttgattcaactgcgactagccaaacacctgtacaagttttaaatgtactagatgattactacaaacgctataattctaatgtccatcgtggtgtacacacattagggtctttagctacagatggctatgaaaatgcaagagaaacagtaagacgttttatcaatgcgaagtactttgaagaaattattttcactcgaggaacaactgcatcaataaatatagtagcacatagttatggtgacgctaatattagtgagggtgacgaaattgttgtaacagaaatggaacatcatgctaatattgttccatggcaacaattagctaaacgtaaaaatgcaacactaaaatttattccaatgacaaaagatggtgaattgcaattagatgatataaaagcaaccatcaatgataaaactaaaattgttgctatcgcacacgtttccaatgttttaggaacaattaatgatgttaaaactatcgctaaaattgcacatgaacatggtgcagttataagtgtggatggtgcgcaatcagctccacacatggctttagatatgcaagatatcgatgctgatttttatagttttagtggacataaaatgttaggtcctactggcattggagttttatatggaaaaagagaattattacaaaatatggaacccgttgaatttggtggagatatgatagacttcgtaagtaaatatgacgccacttgggctgacctaccaactaaatttgaggctggcacaccacttattgctcaagcaataggtttagcagaagctatacgttatattgaaaatttaggttttaatgcgattcatcagcatgaaaaagaattgacagaatatgcatataaacaaatgttaactatagatggtcttgaaatttacggtccaccaaaagatagacgtgcaggggtcattacttttaatttagcagatatacatccacatgatgtagctacagctgttgatacagaaggtgttgcagttcgtgcaggccatcactgtgcgcaacctttgatgaaatggttaggtgtctcttcaacagcacgtgcaagtttttacgtttataatacgaaagaagatgtagatcaattagttcaagcattgaaacaaacgaaggagtttttctcttatgaattttaa

SEQ ID NO: 7266 - DNA, 1308 bp, Staphylococcus epidermidis
atgacaactaaaactttgaacatttctgaagaacaacttgttgattattctaaagcgcacaatgaaccttcttggatgacagagttacgtaaaaaagcgttgaaattaacagaaactttagaaatgccaaaacctgataaaacgaaattaagaaaatgggattttgatacgtttaaacaacaccatacaacaggagatgcatacactcagttaactgatttaccaaaatctgttaaagaaatcattgatgttgaaaactcagaaaacttaatcattcaacataataatgaattggcatatacacaagtatcggatcaagctaaacatgatggtgtgattattgaaggtctatctgaagcactagtcaaccatagtgatttagttcaaaagtactttatgactaaagcagtagatgttgatgaacatcgtttaacagcattgcatactgcattagtaaacggtggtatttttgtttatgtacctaaaaatactgttgtagaacatcctatacagtacgttgttttacatgatgatgaacaagcgagcttttacaatcacgtcatcattgttacagaagaaagtgcagaagttacctatgtagagaactatctttctactactagtggtgaagataaccaacttaatattgtgtcagaggttatcgctggcgcaaactctaacgtcacatatggttcagttgattatttagataaaggatttacaggtcatataattcgtcgtggttctgcagatgcagatgcttctatcaattgggcactaggtttgatgaatgaaggtagccaaattatagataatactacaaatctaaacggtgatcgttcaacaagtgcattgaaatcagttgttgttggcacaggtgatcaaaaaataaatttaacttccaaaattgttcaatacggtaaagaaacagatgggtatatattgaaacatggtgttatgaaagaaaatgcatcttctgtatttaatggaattggctacattaaacatggtggtacgaaatctattgcgaaccaagagtcacgtgtattgatgttatctgaaaatgctcgtggtgatgctaaccctattcttttaatagacgaagatgatgttgaagcaggacatgcagcctcagttggtcgtgtcgatcctgagcaattatattatttaatgagccgtggtatttcaagagctgaagcagagcgtctagttatacatggtttcttagatccagtagtacgtgaattaccaattgacgatgtaaaacgtcaacttagagaagtaattgagcgtaaagtttcaaaataa

SEQ ID NO: 7267 - DNA, 762 bp, Staphylococcus epidermidis; identical to SEQ ID NO: 5617

SEQ ID NO: 7268 - DNA, 861 bp, Staphylococcus epidermidis
atgaaaaaattcaaatggataaatatatttaaaggttttggtatgggtacaagtgatctcgtcccaggtgtaagtggagggactatcgctttattacttggaatttatgatgactttattagctcaattagtggtttgttttcaagacgattttggcctagcttaaaatttttactacctattttagtagggatgctaatagctataggactattaagtcaattatttaattatttgcttagtcaacatcatattcctactatgttattttttacaggtttgattctcggtatcatcccttatttattaaccatctcaaatttcaaaaaaaatttcagtataatacattattttattctattattaggtattgctattatagtcgttttcgcattgcttaatcatggagacaagcattcaggtgaaacacttactttatctttcagtcttatcattaaatattttatcgcaggtgttttcgcttcaagtgctatgttattaccaggcatttctggatcatttatgttacttgtcttcggagtatatgggacgctaatgtatgctatttctgaactacttcattttaatttaaatgcattacctatcatattaatagtaggtttcggtattgtaactggttttatgatttcaagtcgattaattcaatattgtctacatcaacaccctacaatgacatttgctttgataataggctttgtaatcggatcgttgtatgcagttttccctggattcccgaaagacttaatccaatggatcatatcatttttcctattgatcactggcttcttagtaagttatgttcttggtaaaattacagcaaaaaatgaagcatcattttga

SEQ ID NO: 7269 - DNA, 192 bp, Staphylococcus epidermidis; identical to SEQ ID NO: 5619

SEQ ID NO: 7270 - DNA, 159 bp, Staphylococcus epidermidis; identical to SEQ ID NO: 5620

SEQ ID NO: 7271 - DNA, 813 bp, Staphylococcus epidermidis
atgaaaaaattattcggaattattttagtattggctttaacgattgccttagctgcatgtggtggaggtaaagataaggaaaaaactatcacagtaggtgcatctccagcaccacacgctgaaattttagaaaaagcaaaaccattattgaagaaaaaaggttatgatttaaaaatcaaaccaattaacgattatacaacgcctaataaattattagacaaaggtgaaatcgatgcgaacttcttccaacatacaccatacttaaatactgaaagtaaagaaaaagggtataaaattgaatcggctgggaatgttgaattagaacctatggctgtatactcaaaaaaatataaaagcttaaaagatcttcctaaaggtgcaacagtatatgtatcaaataacccagctgaacaaggacgattcttaaaattctttgtagatgaaggtcttattaaacttaaaaaaggcgttaaaattgaaaatgctaaatttgatgacataactgaaaacaaaaaagatattaaatttaacaacaaacaatcagcagaatatttaccaaaaatctatcaaaatcaagacgctgacgcagtaatcattaattctaactatgcgattgaccaaaaattaagtcctaaaaaagattcgattgctttagaatctcctaaagataacccatatgcaaatttaattgcagttaaaaaaggtcataaagatgataaaaatatcaaagtattaatggaagtgctacaatctaaagaaattcaagattatattaaagataagtatgatggagctgtcgtacctgctaagtaa

SEQ ID NO: 7272 - DNA, 696 bp, Staphylococcus epidermidis
atgggtaaatcttacggtgaaatatttcacgaaatggcgacaatgccaaatgttcagtggccagaggtttggcaggcaattttagaaactctatatatgactattgtttcgacgctttttgcatttgtccttggacttatattaggggtattactctttttatctgcgaaaagtaactcattggctgctaagattttctacacgattgtgtcattcattgttaatttatttagagcaattccatttatcatattaattttactgttaattccatttacaagtatacttctcggaacaatcagtgggccaactggtgcattaccagcacttattattggtgcagcaccattctacgctagattggtcgagattgcttttaaagaaattgataaaggtgttatagaggctgcttggtcaatgggagcgaacacttcgatagttgtgagaaaagtgctacttcctgaagcaatgcctgctttagtttcaggtattaccgttactgcaattgctttggtaggttctacagctattgcaggtgttattggcgcaggcggtttaggtaatttagcatatttaacaggatttactcgaaatcaaaatgatgtcattttagtttcaacagtatttattttaattattgtatttataatccagttcctaggggattggcttacaaataaaatcgataaacgctaa

SEQ ID NO: 7273 - DNA, 1026 bp, Staphylococcus epidermidis
gtgattaagctaaaccaaattgttaaacgctatcataccaaggataaagatgttcttgctgttgatcacgttgatttaaacattgaatccggctctatttttggtgtgattggtttctcaggagctggcaaaagtacgcttataagaatgtttaacaacttagaatctccaacgtcaggtgaaatcattatagatggtgacaatataagtcaattatctaaatcacagttacgaaaaaaacgacaaaaagtgagtatgatttttcaacattttaacctgctatggtcaagaagtgtattgaaaaatgtaacatttccattagaaattgctggcgttccaagtggtctagctaaacaaaaagcattggaactcattgaacttgtcggcctaaaaggtcgagaaagtgcgtatccgtctgaattatcaggcggacaaaaacaaagagtgggtattgcgagagcattagctaatgatccagatgtattgttatgcgatgaggcaacaagtgcattagatccacaaactacagatgaaattctagatttattattgaaggtaagggaacaacaaaatttaactattgtacttataacacatgaaatgcatgttatacgaagaatttgtgatgaagttgctgtaatggaaaacggtaaagttattgaacagggagcggtaagtaaagtatttgagaatccacaacatgaagtaacaaaacgttttgtgaaagatgatttaaacgatgattttgaagattctttagagtatttggagccattagatcatgatgcatatattgtgaggttaaactttactggtgaaaatacgactgagcctatcatatcttatatgacgacgacgcataacatagatgtgaatattcttgaagcagatattaagaatactaaaaacggttcgtttggatttttagttattcacataccacatataagtgaagaacatttcaagcaatttaaacataatcttcacgaacaacacgttaatgtggaggtgctaaaacatgggtaa

SEQ ID NO: 7274 - DNA, 297 bp, Staphylococcus epidermidis; identical to SEQ ID NO: 5624

SEQ ID NO: 7275 - DNA, 387 bp, Staphylococcus epidermidis; identical to SEQ ID NO: 5625

SEQ ID NO: 7276 - DNA, 381 bp, Staphylococcus epidermidis; identical to SEQ ID NO: 5626

SEQ ID NO: 7277 - DNA, 354 bp, Staphylococcus epidermidis
ttgattaaattttatcagtatccgaaatgcacaacgtgcaaaaaggctgcaaagtttttagatgagcacgatgtgaattatgaatccattgatattgttcaacatacaccgactaaaaaagaattcaaaaatatcgtagataaaacgggtgtgaatattaataagttgtttaatacacatggtatcaaatatcgcgaattaaatttaaaagagaaacttaaaaatatgtctgatgatgaaaaactagaactacttgcttcagatggaatgttggttaaacgtccattagctatttctggtaaccatttgactttaggatttaaagaaaatgagtatcaacaccaatggttatag

SEQ ID NO: 7278 - DNA, 324 bp, Staphylococcus epidermidis
atgaaaaatattcatcaaaccgaagaatttaattctactattggtagtactgatccagtaattatcaagtttgaagccgactggtgtccagattgtaaagcgatggatatgtggatagatccaattgttgaaaaatataataattatcaatggtatgtggtcgatcgtgacgaattagaagatgtgacaactgaaaatgatgttatgggtatcccaagtattttaatattccaaaatggtaaaaaattagcacacttgcattcagcaaatgctaaatcacctgaacaagttgaatcattcttgactgaacatttagatcaataa

SEQ ID NO: 7279 - DNA, 543 bp, Staphylococcus epidermidis
ttggaattacaagaagctatatctaatcgtagaagcgtcaaaaaatttaaacacgatatggtggttgatgatcaaacggtttacgatgcaatatataaagctactgacgctccaaatcatggtatgagagaaccatggagattggttcatatttcaaaagataaactcggtgattttagtagggatatcacaagatttgcttttccagatagtccggataagcgagaggatcactttcatgcagtaacaaatttaggtggcatgttgttgttgattttaaaagatgatccaagacaacgtcaaagtcgtgaaaattattttgcatttggagcttttgctcaaaatttaatgttacttttatacgaagcgggtattggtacttgttggaagtcgccacaatatatctttgatcctaaaatacgaaaagctttgggtgtaaaggataatgaaatattagcaggatttttgtatcttactgatttagaagaagtaccaacgaaggctaaacgtaaaaataaaaatcttattaccgaatttgaataa

SEQ ID NO: 7280 - DNA, 717 bp, Staphylococcus epidermidis
atgacccatgtagatattgcagcgacaattgcaccagaagacaagctttctaaaactttactcaaagatataaaagtaaacgaagaatcaatagatatcattgaattgcgcattgaccaatggccatcatttaataaggcattattaaatgaagtgattaagcaattaaaaatattccatttgaaaatattagtaacatatagaacttcagttcaaggaggaaaaggagctgtaaatgagcaagagtatttaaatatactaggtgaattaattgagtgtccacaatttgatatgattgatattgagtggagcagtgccgtcaaaattgaaaaatatacgcatcttgttcaacgtgcacaacaaaaagggctcgaagttgttctttcgcatcataattttcaagaaacacctgctttagatgaacttaaatttatttactttaaaatgcaaaaactcaatcctgagtatttaaagcttgcggttatgcccaaatgtcaagaggacgtgttacatttattagaagccatgtcactcacagcgaagcacacaacatgccgaattgtcggtatatcgatgtctagtttgggtaaagtcagccgaattgctcaaggcgtatttggtggaacgctgtcttatggttgcatagaagaaccacaagcacccggacagatacatgtctctaagttaaaatccatggtttctttttatgaggattaa

SEQ ID NO: 7281 - DNA, 426 bp, Staphylococcus epidermidis
atgatggcagttcaatatgaaactaaagcgactaacgtaggtggacgtaaaggtcatgtccatactgacgataatgcaataaatgtagatgtattaccaccacaacaagctgacggtaaagcgactaatccagaacaattatttgctgcaggttacgcttcatgctttaatggtgcatttgatttaattttaaaacaaaataaagtgcgcgatgctgaacctgaagtaacgttaacggtacgcttggaagacgatccagatgccgaaagcccaaaacttagcgttgatattcatgcaaaagttaaaaatgttttatcacaagaagatgctgaaaaatatttacaagatgcgcacgacttttgtccgtattcaaaagctacacgtggcaatatcgatgtaaacttaaatgttgaagtagtagaataa

SEQ ID NO: 7282 - DNA, 117 bp, Staphylococcus epidermidis
atggaaacttcagttcttatccccacaaatgatatttcacgacatgtaaatgatattgtagaaacaattcccgatactgaattcgatgaattcagacatcattgtggcttaatataa

SEQ ID NO: 7283 - DNA, 129 bp, Staphylococcus epidermidis
atgcacggtaatggcggaattccagcgcagcaaacgacggatgttccgctcgatctcggcgtcgccggggtattcttcctcgtcctcggctgcaatggtgttgatgtagtcggtggaggtgagcgctga

SEQ ID NO: 7284 - DNA, 981 bp, Staphylococcus epidermidis
atgtgtactgccatttctttatatacaaaacaacgttaccattatttagctagaacaatggactttgcatttgaatttaatggtatcccaaccattgttccacgccattatcactaccaatttgatctagattcagacatgcgtcttgaatatggttttgttggaacaaatttaaaagtaggacgttatagatttggtgatggtataaacgaaaaaggtttagctatttcgaaccattacttcactggtgaagcctcatacagtacccataaacgttatggttattttaacttagcacctgaggagtttattgtttgggttttaggttttaataaaagtattagcgaattaaaacaaaaggttaagaaaatcaatattatgaatgaaaaaaatacgactttgaatatcgttcctcctttacatttcatggtcactgatgaaacaggacataccgtagccatagaacctcacaatggcttattaatagttaaagataattatgttcataccttaacaaatgaacctaaattagattggcatctatctaacttaagaaattacgcttttttaacgccacagaaatcaaccaatcaattaataggtaaagtgctagtaagatcaatgggctgtgaagcaggaacaaatggcttaccgggtggttatacgtcaacagatcgttttatacgcgctacatatttaagacaccaactacgctgttcccataatgaagatgaaaatttaatgaattgttttaaagttctagaatcagtcagtatccctcaaggtgcagttatcgatgccaataaaatacattacacacaatatcaattagtgatggaaagtaaagaaagaagttattatattaagccttactttagcaatcaaattttcaaaataaaattaactgaagaccttttaagtaagaatgagatgacattcttacctattaatcacgaattaaagataacatcaatacaatag

SEQ ID NO: 7285 - DNA, 831 bp, Staphylococcus epidermidis
atggctttaaaaaaagtattaacgatagctggttcagatacaagtgctggtgccggtatgcaagcagatcttaaaacgttccaagaacttgatgtatatggaatggtcgctttaacatctattgtaacaatggataaagaaacatggtcccatgatgtaacacctattgatatgaatgttttcgaaaaacaacttgaaactgcaatatcaattggacctgatgctattaaaacaggaatgttagggacacaagacattattaaacgtgccggagatgtttttgttgaatctggtgcagactattttgtagttgatccagtaatggtttgtaaaggagaagacgaagtacttaacccaggaaacacagaagcaatgattcaatatttactacctaaagctacagttgttaccccgaatttattcgaagcaggtcaactctctggtttaggaaaattaacatcaattgaggatatgaaaaaagctgctcaagtgatttatgacaaaggcacacctcatgtcattattaaaggtggtaaagcactcgatcaagataaatcttatgacttgtactatgatggccaacaattttatcaattaactactgacatgttccaacaaagttataatcatggtgcaggatgcacatttgctgctgccacaacagcttatcttgcgaacggtaaatctccaaaagaagcaatcattgctgctaaagcatttgtagcttcagcaatcaaaaatggttggaaaatgaatgactttgtaggacctgttgatcatggtgcatataaccgtattgaacagattaacgttgaagtcactgaggtttaa

SEQ ID NO: 7286 - DNA, 261 bp, Staphylococcus epidermidis; identical to SEQ ID NO: 6708

SEQ ID NO: 7287 - DNA, 363 bp, Staphylococcus epidermidis; identical to SEQ ID NO: 6707

SEQ ID NO: 7288 - DNA, 1149 bp, Staphylococcus epidermidis
atgaaacaacctgttattattgcagcaaaacgtatagctttcggtaagtatggtggccgattgaggcatttagaacctgaatcattactagaacctttatttaatcattttacagatcagtatccaaaagtaatgtctcttttggatgacgtcattttaggtaatacggtaggtaatggggggaatttagctagaaaatcattacttgaagcgggattagattttaaaatacctggtataacaattgatcgtcaatgtggctcaggtcttgaagccgttatacaagcctgtaggatggtacaaagtggtgctggaacaatatatattgcaggtggtgttgagagtaccagtagagcaccttggaaaatcaaacgtccgcagtcagtttatgaatctgagtttccacaattttttgaacgggcgccttttgcaagagaaggagaagacccttcaatgattgaagcagccgaaaatgtagcgaagaaatatcatatcagtagaaatgaacaagatgactttgcgtatcgcagtcatcagttggcatcaaaaaatatgaataacggtaatatttcccaagaaattttaccgttcaaagtgaaaggtgaatattttaatcaagatgaaagtattaaacctcaacttactctcagaacacttggcagacttaaaccacttttaaatgaaggaacagtcacagtaggaaatagttgtaagaaaaatgatggtgcagtattactgattgttatggaagaaaatcgggcacgtcaattaggattcacagaagggattaagtttgtgaatagtgcaactgtaggtgttcaaccacagtatttaggagtaggtccagtgccagcagtaaatcaattattagctcaagaacgattaactataaatgatataaatgcagtagaattaaatgaagcatttagctctcaagttattgcgagccaacaacagcttaacattcctttgaataagttgaattgttggggaggagcaattgctacagggcatccatatggtgcaagtggagcagcgttagtcacacgtttattttatatgaaacatcaatttagaactatagcaactatgggaataggtggagggataggaaatgcagctttatttgaaagatggtatggaaattag

SEQ ID NO: 7289 - DNA, 1362 bp, Staphylococcus epidermidis
atgaaaaaaataatggaatatttacagcattatattaatcaatacccgcatcgattagctttagtgtttgaagatcgacatctaacgtatggagaattaagtaaagaaatttatcaggctagtatgcgctataaagaagtaaaattaaacaaaaaagtaggtctaatggatcaacatcctgtaaataatattattaactattttgcggtacatcaaagaggtggaattccttgcatttttaatcatcaatggagtaatgaaaggatacatcaacttgtaaaaagttatgacatacaatggttaattaaagataatcatcttacctcaaatcatgataactcaatttataatgatgaggttatcccacgtaatgttatacatataggtttcacgtcaggaactacaggtttacccaaagcgttttatagaaatgaacattcttggatagtttcttttaaggaaaatgagaaattactccagcattgtgaagaaaccattgtagcaccgggtcctttatcacattcactttcattgtacgcatgtatttatgcattaagtactggaaaaacatttataggtcaaaaaaattttaatccactatctcttatgcgtcttattaatcaattgaacaaaacgacagcaatatttgtagtgccaacgatggtacaacaacttatttcaactcaacgacattgttcatcgattaaaagtattttgagtagtggtgctaaacttacattgcaacagtttcaacaaatcagaaatttatatccacaagcaaatttaatagaattttttgggacatctgaagcaagttttataagctacaattttaaccaatcatctcctgctaattctgttggtaaacttttccctcatgtcgagacacgattattaaatcaagatgatgatgcagtaggattattagccgttagaagtgaaatggtgtttagtggttatgttggacaaagcaatcaagagggggcatggattaaaacaggcgacttcgcttatattaaaaatcaacatttgtttttagtaggtagagagagtgatcgtattatagttggggggattaatgtatatccaacagctattgaaagcttaattatggatattgaaggcattgatgaggcccttgtcattggtataccacatgctaaatttggagaaatagcgatattgctttattcaggtaaagtacaattgaattaccgacaaattaaatcttttttaatgaaacatctttcaagacaagaagttccatcaaaattaaagaaaattgaccatatgatttatacagaatcaggaaagattgctagaaaagagatgaaaaataaatttattaatggagagttataa

SEQ ID NO: 7290 - DNA, 648 bp, Staphylococcus epidermidis; identical to SEQ ID NO: 6704

SEQ ID NO: 7291 - DNA, 549 bp, Staphylococcus epidermidis
atgagtgaatttaataattatcgtcttattcttgaagagttagattctactttatctcaagtagataatacagagtatgaacgttttgctaatgatgttataggtgcagatcgcatatttacagctggtaaaggtcgttcaggttttgttgctaatagttttgcaatgcgcttaaatcaattaggtaaaaatgcctacgttgtaggtgagtcaacaacaccttcaattaaagaacatgatttgtttattattatttcaggttcaggttctacagaacatttaagattattagctgaaaaagcacaatctgagggtgcaaaaattgtcttattaactacaaatgcggaatcgccaatcggtaatcttgcagagacggttgttgaattgcctgcaggtactaaacatgatgttgagggttcgaaacaaccacttggtagtttatttgaacaggcttcacttatattcttagatagtgttgtattacctttaatggatgcatttcacattagtgaaaaaacaatgcaagagaatcatgctaatttagaataa

SEQ ID NO: 7292 - DNA, 633 bp, Staphylococcus epidermidis
ttggaactacaattagccattgatttattaaataaagaagaagcagcaaaattagctcaaaaagttgaagaatatgtagatattgttgaaattggtacgccaattgtaattaatgaagggttacctgcagttcaacatttaaatgaaaatattaataatgctaaagtattagctgacttgaaaattatggatgcagcagattacgaagtgagccaagcagtaaaatatggtgcagatattgttacaattttaggtgttgctgaagatgcttcaattaaagcagcagttgaagaagcgcataaacatggaaaagcattgcttgttgatatgatagcagtgcaaaacttagaacaacgtgctaaagaactagatgagatgggtgcagactatatcgcagttcatacaggttacgacttacaagctgaaggaaaatctccattagacagcttgcgtacagttaaatctgttatcaaaaactctaaggttgcagtagcaggtggtattaaaccagatactatcaaagatattgttgctgaagatccagatttagttattgttggtggcggtattgcgaatgctgacgatcctgtagaagcagcaaaacaatgtagagcagctattgaaggtaaataa

SEQ ID NO: 7293 - DNA, 732 bp, Staphylococcus epidermidis
ttgaaaattattaatttagattcaaaaaatcttgcgtcattttatgtagcatgcgagttgtttaaacaaatacagcagcaccctcatgccaaactcggtttagcaactggtggaactatgactgatgtatatcattacttagtaaatttattaatcaaaaataaagttgatgtgtcgcaggttgaaacatttaatttagatgaatatgtaggtttaaaagcaagtcatcaacaaagttaccatacctacatgaataaagtgctatttgagcaatatcctcattttgttaaaaatcacattcatattcctgatggcttgtcagaaaatctagaagcagaagcggaacgatataacaatttattagatgaaagagggccaattgatattcaaattttaggaattggagaaaatggtcacattggttttaatgaaccagggactgacttcaatagtgaaacacatgtggtgaacttaacagaaagcaccataaaagcaaatagtcgattttttgacaatgaaaaggatgttcctagacaagcagtttcaatgggggtaaaaagtattttaaaagcaaaaaggattatcctactcgcatttggtccaaagaaaaaagaggctataagtaaactgttaaatgaacaggttaccgaagatgtacctgcgaccattttacacacacaccctaatgttgaagtttatgtagacgatgaagcagcgccagattgtttataa

SEQ ID NO: 7294 - DNA, 360 bp, Staphylococcus epidermidis; identical to SEQ ID NO: 6700

SEQ ID NO: 7295 - DNA, 666 bp, Staphylococcus epidermidis
atgactgatgaaagacacgtacttgtgattttcccccatcctgatgatgaaactttttcgtctgctggaactatcgcaagttatattgaaaaaggtattcccgtcacatatgcatgtcttaccctaggacaaatgggacgtaatctaggtaaccctccttttgcaacaagagaatctttaccatttatacgtgaacgtgagttagaagaagcatgcaaagcaattgggattacagatttaaggaaaatggggttaagagataaaactgttgaatttgaaccttacgatcaaatggatcaaatgattcaatcacttattgacgaaacaaatccatcattaattatttcgttctatcctaaatttgcagttcaccctgatcacgaggcaactgcagaagctgtagtacgtacagttggacgcatgcatgaatcagatcgaccccgtcttacacttgtagcgtttagcaatgatgcatcagaaattcttggagaacctgatattcaaaatgacatatctcaatatagtgatataaaacttaaagcttttgaagcacatgcttcacaaacaggaccatttttaaaacaacttgctagtcccgaaatagatggtcaagcacaaagtttcttaaaaatagagccattttggacatatcactttgaatcttaa

SEQ ID NO: 7296 - DNA, 879 bp, Staphylococcus epidermidis
atgacagaatttgacttatccactagagagggtcgttggaaacatttcggttctgttgaccctgtcaaaggtacgaaaccaactactaaaaatgaaatgaccgatttacaaagtactcataaaaatttcttatttgaaatagaggaagtaggcattaaaaatttaacttatccagttttaattgatcagtaccaaacagctggtttatttagtttttcaacgagtttaaataaaaatgaaaaaggcattaatatgagtcgcatattagaaagcgttgaaaaacattatgataatggcattgaacttgaatttaacacactacatcaattgttgcgtactctacaagataaaatgaatcaaaatgctgcaggtgttgatgtgtcaggtaaatggttctttgatcgttatagtcctgtgactaatattaaagctgtaggccacgcagatgttacttatggtttggctattgaaaatcataccgttacacgcaaagaattaactattcaagccaaagtaacaacactatgtccttgctcaaaagaaattagtgaatattccgcacataatcaacgtggtatcgttacagttaaagcatatttagataaaaataatgatgtcatcgatgattataaagataaaattttagacgctatggaagccaacgctagttctatcttatatccaatcttaaaacgtcctgatgaaaaacgagtaacagaacgcgcttatgaaaatccacgatttgttgaagatttaattcgactaattgcagctgacttagttgaatttgactggattgaagggttcgatattgaatgtcgtaatgaagagtctatccaccagcatgatgctttcgcacgtctgaaatatcgcaaataa

SEQ ID NO: 7297 - DNA, 168 bp, Staphylococcus epidermidis
atgattactgtattagtcattactatattttttattacagtaactttaataatttggcaaccaaaaggattagatatagggatttctgcagtcatcggcgcgcttttagctatcgttactggagtagtgagtgtctcagatatattagaagtgacaagtatagtttaa

SEQ ID NO: 7298 - DNA, 492 bp, Staphylococcus epidermidis
atggttaaagcatcacaaggacatggattaaaaatgtttgtgtttatcatgatattaggtgcaattattgcagcattttttgctaatgatggagcaaccttaattttgacgcctatcgctttagcgatgataagaaatttaggtttcaataaaaagctagtgtttccttttattatagcttgtgggtttatcgtatattccacatcattaccacttgttgtaagtaatttggttaacattgtatcagcagattactttggtattgaatttgttgaatatttaaagcgtatgtttatacctaatttattttctctattagctagtatcttaatattatggttttactttagaaaatccatccctaaaacatttgatatatcaagtatttttgaacctaaaaatgctatacgagacacacgattatttaaaatttcatggattattttagctttattacttataggttacttagtgagtgagttcatcccctaa

SEQ ID NO: 7299 - DNA, 159 bp, Staphylococcus epidermidis
ttgtgtagtgatgcagatgcaaactgtccagttttacctaaaaacgtcactaaagaacattggggatttgatgatcctgctggtaaagattggtcagaatttcaacgtgtaagagatgagattaaaacaacgatagaaacatttgctcatagagagtaa

SEQ ID NO: 7300 - DNA, 1503 bp, Staphylococcus epidermidis; identical to SEQ ID NO: 6696

SEQ ID NO: 7301 - DNA, 3213 bp, Staphylococcus epidermidis
atgattaataaaaaaaataatttactaactaaaaagaaacctatagcaaataaatccaataaatatgcaattagaaaattcacagtaggtacagcatctattgtaataggtgcaacattattgtttggtttaggtcataatgaggccaaagctgaggagaattcagtacaagactttaaagattcgaatacggatgatgaattatcagatagtaatgatcagtctagtgatgaagaagagaatgatgtaattaataataatcagtcaataaactctgatgataataaccaaataaataaaaaagaagaaacgaataacaacgatggtatagaaaaaagctcagaagatagaacagagtcaacaacaaatgtagatgaaaacgaagcaacatttttacaaaagtcccctcaagataatactcatcttacagaagaagaggtaaaagaaccctcatcagtcgaatcctcaaattcatcaattgatactgcccaacaaccatctcacacaacaataaatagagaagaatctgttcaaacaagtgataatgtagaagattcacacgtatcagattttgctaactctaaaataaaagagagtaacactgaatctggtaaagaagagaatactatagagcaacctaataaagtaaaagaagattcaacaacaagtcagccgtctggctatacaaatatagatgaaaaaatttcaaatcaagatgagttattaaatttaccaataaatgaatatgaaaataaggctagaccattatctacaacatctgcccaaccatcgattaaacgtgtaaccgtaaatcaattagcggcggaacaaggttcgaatgttaaccatttaattaaagttactgatcaaagtattactgaaggatatgatgatagtgaaggtgttattaaagcacatgatgctgaaaacttaatctatgatgtaacttttgaagtagatgataaggtgaaatctggtgatacgatgacagtggatatagataagaatacagttccatcagatttaaccgatagctttacaataccaaaaataaaagataattctggagaaatcatcgctacaggtacttatgataacaaaaataaacaaatcacctatacttttacagattatgtagataagtatgaaaatattaaagcacaccttaaattaacgtcatacattgataaatcaaaggttccaaataataataccaagttagatgtagaatataaaacggccctttcatcagtaaataaaacaattacggttgaatatcaaagacctaacgaaaatcgaactgctaaccttcaaagtatgtttacaaacatagatacgaaaaatcatacagttgagcaaacgatttatattaaccctcttcgttattcagccaaggaaacaaatgtaaatatttcagggaatggtgatgaaggttcaacaattatagacgatagcacaataattaaagtttataaggttggagataatcaaaatttaccagatagtaacagaatttatgattacagtgaatatgaagatgtcacaaatgatgattatgcccaattaggaaataataatgatgtgaatattaattttggtaatatagattcaccatatattattaaagttattagtaaatatgaccctaataaggatgattacacgactatacagcaaactgtgacaatgcagacgactataaatgagtatactggtgagtttagaacagcatcctatgataatacaattgctttctctacaagttcaggtcaaggacaaggtgacttgcctcctgaaaaaacttataaaatcggagattacgtatgggaagatgtagataaagatggtattcaaaatacaaatgataatgaaaaaccgcttagtaatgtattggtaactttgacgtatcctgatggaacttcaaaatcagtcagaacagatgaagatgggaaatatcaatttgatggattgaaaaacggattgacttataaaattacattcgaaacacctgaaggatatacgccgacgcttaaacattcaggaacaaatcctgcactagactcagaaggtaattctgtatgggtaactattaatggacaagacgatatgacgattgatagtggattttatcaaacacctaaatacagcttagggaactatgtatggtatgacactaataaagatggtattcaaggtgatgatgaaaaaggaatctctggagttaaagtgacgttaaaagatgaaaacggaaatatcattagtacaactacaaccgatgaaaatggaaagtatcaatttgataatttaaatagtggtaattatattgttcattttgataaaccttcaggtatgactcaaacaacaacagattctggtgatgatgacgaacaggatgctgatggggaagaagttcatgtaacaattactgatcatgatgactttagtatagataacggatactatgatgacgaatcggattccgatagtgactcagacagcgactcagattccgatagtgattcagactccgatagcgactcggattcagacagcgactcggattcagacagcgactcggattctgatagcgactcggattcagacagcgactcagactcagacagtgattcagattcagacagcgactcagattccgatagtgactcagacagcgactcagactcagacagtgattcagattcagacagcgactcagattccgatagtgactcagacagcgactcagattctgatagtgattcagactcagacagtgattcagattcagacagcgactcagattccgatagtgattcagactcagacagcgactcagattccgatagtgattcagactcagacagtgactcagattctgatagtgattcagactcagacagtgattcagattccgatagtgattcagactccgatagcgactcagactcggatagtgactcagactcggatagtgactcagattctgatagtgattcagactcaggcagtgattcggattccgatagtgattcagactcagacaacgactcagatttaggcaatagctcagataagagtacaaaagataaattacctgatacaggagctaatgaagattatggctctaaaggcacgttacttggaactctgtttgcaggtttaggagcgttattattagggaaacgtcgcaaaaatagaaaaaataaaaattaa

SEQ ID NO: 7302 - DNA, 567 bp, Staphylococcus epidermidis; identical to SEQ ID NO: 6694

SEQ ID NO: 7303 - DNA, 879 bp, Staphylococcus epidermidis
atgataaagctaatagcaactgatatggatggaacattacttaacgctggtcatgaaatcaccactatgaaccaagaagcgataaaatttgcgcaagcgaacggtattacagtagttattgcaactggtagagcgttttacgaggcacaaacacctgttgctgaaacagacttaaaagtcccttacatatgtttgaatggtgcagaagttcgtgacgaatcatttaacataatgagtacatcacatcttaatcatgatttagtacacaaaattacgacagcacttaaaaataatcatatttattatcaaatttacacaaatcgtggcatatatacagaagatcctaaacgtgatttagcaatctatatagatattgcagaacgtgcgggtcaaaaagcagatgtagccaagatacgaaataatatacaaaaacgcatagataacggtactttaaaagttgtagataattatgattcaattgaagatattcctggagaacttattatgaaggtgttagcttttgatgcagatttaagtaaaatcgaccaagtaggtcaggagttagcatcatcaccaaatttagcagtatcctcatcatcaagaggtaacctagaaatcactcattcagacgctcaaaaaggcattgccttatcagctattgctcatcaattaggtatagatttaacagatgtggtagcaataggagataatttaaatgatatttcaatgctagaacgtgtaggttatccagtagcaatgaataatgctacagatgaagttaaacatattgctaaatatgtcacagacaccaatgaaaatagtggagttggaaaagcaatcatgaaaatattaaaagaagaaaataatttagaggtgtaa

SEQ ID NO: 7304 - DNA, 507 bp, Staphylococcus epidermidis
atgaaaaaaaatcatgattacatgcgcttagcaattaatgaagcacacaaagccaaagcattaggagaagttccaatcggagcagttattgttaaagagggtcaagtcattgcacgtgcacataatttaagggaaacattgcagcaacctaccgcccatgcagagcacatagcgatagaacgggcttcagaagttgtcggcagttggagattagaagaatgtacgttgtatgttacattagagccctgtgttatgtgtgcgggcactattattatgagccgtattccaaaggttgtgtatggtgctactgattccaagggaggttgttcgggaagtcttatgaatttattagaacaaccccagtttaatcatagggcaaccgtagaaaaaggaattttagaagaagagtgtgcagaactattgagaagtttttttaaggaaatacgtgaaaagaaaaaagcagaaaaacaggggaagatacaaaaggatataaatttgttaaaatga

SEQ ID NO: 7305 - DNA, 618 bp, Staphylococcus epidermidis; identical to SEQ ID NO: 6691

SEQ ID NO: 7306 - DNA, 663 bp, Staphylococcus epidermidis; identical to SEQ ID NO: 6690

SEQ ID NO: 7307 - DNA, 753 bp, Staphylococcus epidermidis; identical to SEQ ID NO: 6689

SEQ ID NO: 7308 - DNA, 1305 bp, Staphylococcus epidermidis
atgacaaataatcactttcttaacataggtgtgttactgtatgggtgtggtcatcatcaagcggcatggcgtatgaaagattctaatattgaggatatcggcaacatatcttattatcagcatttagctcaaatagctgagaaaggctttttggatatcgtcttttttgcagacaatcaagcctttaatgcgagtgataatactactatgcccgctttttggtttgatcctataattaacttatcagctattgcacaagttacatcgcatataggattagtgccaacaatatcgagtacattttcaaatccattcaccgcttctcgtcaattattaagtctagactacttatctcatggccgtgtaggttggaatttggtcacatccatgacagatattgaagcccaaaatcacagtcttcaatacttaccggaaagacatgagcgctacaaaaaagcagatgaatttgcatcggtaatgaataagctattcacttcttggtcaactgcatcttatgtaccagataaaaacaacaacaaaattattgagtctaaagatattaaacctttttatcatgagggggactattttcaagtacgaggaccacatacaacaccacaaagtcctcaaggtaaaccagtatctatgcaagccggtgcgtcaaaagaaggtattgcattagcagcaaaatatgctgatgctgtttactctgtttcatgggatattaagcaagcacgtagttataaaaagaaattgtctgatgctatatctaaaactcaccatccagatagaaaaattaaaattttccctggtttagtaacgtatgtaggtgaaacccatgaaaaagcattatcaaaaaaagcagaacttgatcaaaagttacccattgaagatgctttaaagcaactcagtttttttgttcaacaagattgttcagattgggaattagatgaaccagttcctcccttacctcccgttgaaaatttcaaaggtccgattggtcgatatgaaacagttttagcaattataaaagataaacaaccaactgtaagagaattattaggttacctaagtgccggtggtggtcatcttactcttataggtacacctgaggagatagtggatgagatggagcactggtttaatgaaggcgttgcagacggctttaatctgatgccaccttcattaccccatagccttgaagattttgtaaaatacattataccagaactacaacgtcgttctttatttaaaaattcttataatcaacctacactacgtacattattaaatctcaactcataa

SEQ ID NO: 7309 - DNA, 696 bp, Staphylococcus epidermidis
gtggaatggatattatttgataaagatggtacattgattgagtttgacagtagttgggaaaaaattggcgtacgtctcgttgatcaacttttagaaacctttccagtacatgacaaggaagcggcacatcgccaattaggtattatcgataaaaaaattaaaccagattctgttatgggatcaggttcattaggtgaaattatagagtcttttaatggtgtaacaggtaaagaaacttcagattggacaagggatacgagtcaggaactcattgattcaagagtgcctgaaaacaattggattgatggtgtacaagaaactattcaagctcttagaaatgaaggatatcacataggcatagtaacaagtgatactaaaaaaggagtcgatcaatttctggaggaaacgcaaactagaaatctctttgatttagtaatttctacagaaacacatgcagaagaaaaaccacatcctaaagtgttagatccactatttaatgcttttgatgttgaaccgggacaggtagcaatagtaggagatacggccaacgatatgaaaaccgcgattaatgctaatttaggattaggtatcggtgtgctaacaggcgtggctaaaaaagaggaactctacgacgcagatgtcatcataaacagtgcaaaagatgttaaacaagttatagaacaatacggaaaataa

SEQ ID NO: 7310 - DNA, 1695 bp, Staphylococcus epidermidis
atgacaaagcaaaatatatttatagatgacatttattgggaacgtgtccaactcttcgtcaaaggacattttgaaggagtaaaacctacaagaaatttccttcttagaaatctaacagaaacaaaactattaaatgccaatcatgttaatattcaagggtcaacttttgaggcaagatttaatattgctattttagaaaaaggtaattttttaggtacaggcaattatatattaatcaaccgacaagaagatgaatatgtctgccaaattaaccccaaatttttgaatgataaaaaaaatcagatgactttagaggagttaagagattacaactcacttgagacccaatcgttacaaaaaagttatttattaaaaaagtatggtaaaagtttccaaagatataataacaaagagattaaatcttacgtcattgttccggcaatatcccaagaaattaatgagtttatttttaaagttcaatataaatctgaaataaagaaaataagtaaacttaagcaattatcatacatattacataaagctttgaggaaaattagcttcaatgtgagagataaaatatatttgtcggtatttaacatttccaaaacagtatataagaataataaaaatcatgttttgtttacatcagattctagagcaaatatgtcaggaaattttaaatttatatacgaagaaatgcttaaacaacaattggacaaaaaacttgtcattcattctatttttaaacctaatatagcaaataggagatcgtttattgataaattaaaatttccatattttttaggaaaatctaaatatatcttggttgatgattatcatccgatgatatataaacttcaatttagagaaaaccaagaaatagttcaagtatggcatgctgtgggtgcttttaagactgtaggatttagtagaactgggaaaaaaggaggacctttcatagactctattggacataggaattatagtaaagcttatgtttcgtcaaataatgatattctttactatgctgaagcttttggaattgaagaacatagggttattccaacaggtgttccacgtacggatgttttgttcgatgaatcttataaaacacgcattaaacaaagtttagaaacaaaattaccaattataaaaaataaaaaagtcattctttttgcacctacatttagaggaaatggacatcgcacagcacactatcctttctttaaaattaattttgcaagattagctagttattgtgaagaacatcaagctactgttctgtttaaaatgcatccttttgttagaaataaattaaatatcccagcaatttatagtaaatattttttagatatttcaaattaccgcgaagtaaatgatgtattgttcattacggatattttaatctctgattattcttctttaatctatgaattttcagtttttaaaaaaccaatgcttttttatgcttttgatttggaagattatatttacacgagagatttttatgaaccttatgaaacctttgttcctggtaaaatagtgaaaacttttgatgagcttattttagctttagaaaataatgattttgaattagaaaaggtgaagccgtttttaaataaaaattttaaatataaagatggtaaatcaagtgaacgattagttaaagatttatttaacaaattttttcagtaa

SEQ ID NO: 7311 - DNA, 1032 bp, Staphylococcus epidermidis; identical to SEQ ID NO: 6685

SEQ ID NO: 7312 - DNA, 717 bp, Staphylococcus epidermidis; identical to SEQ ID NO: 6684

SEQ ID NO: 7313 - DNA, 1077 bp, Staphylococcus epidermidis; identical to SEQ ID NO: 6683

SEQ ID NO: 7314 - DNA, 957 bp, Staphylococcus epidermidis; identical to SEQ ID NO: 6682

SEQ ID NO: 7315 - DNA, 210 bp, Staphylococcus epidermidis
atgaaacgaagttcatacctacgtcgtcaatcaaatttaattatatctatgattattttcgttatttttttaattgtagatatcaatgtacttattaataaacatcaagttgtgcctgtgctattatcaagtatcagtttaattatttttatcatgctatttgtagttgcattgttcaaatgtataactaattataaacatcaatcttag

SEQ ID NO: 7316 - DNA, 951 bp, Staphylococcus epidermidis; identical to SEQ ID NO: 6680

SEQ ID NO: 7317 - DNA, 510 bp, Staphylococcus epidermidis
gtggaggaaataagaccaataacctatcaagataaagaggcatactattattatattcaagagtggtatgaaaatgaggaaaaagtggtaccagggaatacagatattgccaattatagttcatttaacaatatggttgatcggcttaattgtagtgaagttgatgagggttttgtaccgactacaacactattttattttaaagattcaattattataggtgctgttgatatcagacatcaattaaatgataaactatctaatattggtggtcatgtgggatacggtgtagctaaatcttatagagggaaaggttacgctactatccttctagaaaaggctttagatgaacttaagacattaaatgtagaggtcgtacttatgacttgtaatccacttaattttgcttctcaaacagtgatgaagaaatgtggtggatatcaaattgaatcctatattaaaaaaaatggtaaacctgttcatcgatatcatatacctaatacaaaataa

SEQ ID NO: 7318 - DNA, 1188 bp, Staphylococcus epidermidis; identical to SEQ ID NO: 3982

SEQ ID NO: 7319 - DNA, 1185 bp, Staphylococcus epidermidis; identical to SEQ ID NO: 3983

SEQ ID NO: 7320 - DNA, 2082 bp, Staphylococcus epidermidis
atggcaagagacttttctttgaaaaatactcgtaatatcggtatcatggctcacattgatgctggtaagacaactacgactgaacgtattctttactacacaggtcgtatccataaaattggtgaaacacatgaaggtgcttcacaaatggactggatggaacaagagcaagaccgtggtattactatcacatctgctgctacaactgcacaatggcaaggtcaccgtgtaaacatcattgatactcctggacacgtagacttcacagttgaagttgaacgttcattacgtgtacttgatggtgccgttactgtacttgatgcacaatcaggtgtagaacctcaaactgaaacagtttggcgtcaagcaacaacttatggtgtacctcgtattgtttttgtaaacaaaatggacaaattaggtgcgaactttgaatattcagtaagcactttacatgatcgtttacaagcaaatgcagcacctattcaattacctattggtgcagaagatgaatttgaagcaatcattgacttagtagaaatgaaatgctttaaatatacaaacgacctaggtacagaaatcgatgaaatcgaaattccagaagaccataaagaaagagctgaagaagctcgcgctcaattaattgaagctgttgctgaaaacaacgacgatttaatggagaaatatcttggggatgaagagatttcagttgatgaattaaaagatgctatccgccaagctactactgacgtagaattctacccagtactttgtggtacagcgttcaaaaacaaaggtgttcaattaatgcttaatgcagtaattgattatttaccttcaccattagatgttaaaccaattattggtcatcgtgcgaacaaccctgatgaagaagttgttgctaaaccagatgattcagcagaatttgctgctttggcatttaaagttatgactgacccttatgttggtaaattaacattcttccgtgtatactctggaacattatcttcaggttcatatgtgaagaactcttctaaagataaacgtgaacgtgttggacgtttattacaaatgcacgcgaactcacgtcaagaaattgacactgtttattcaggtgaaattgcagctgcagtaggccttaaagaaacaggtactggtgatactttatgtggagagaaaaatgacattatcttggaatcaatggaattcccagaaccagttatccacttatcagttgaaccaaaatctaaagctgaccaagataaaatgactcaagctttagttaaattacaagaagaagacccaacattccatgcacacacagatgaagaaactggacaagttatcatcggtggtatgggtgaattacacttagatattttagttgaccgtatgaagaaagaattcaacgttgaatgtaacgtaggtgctccaatggtttcttatcgtgaaacatttaaacaacctgcacaagttcaaggtaaattctcacgtcaatctggtggtcgtggtcaatatggtgatgttcatattgaattcactcctaacgaaacaggtggcggtttcgaattcgaaaacgctattgttggtggtgtagttcctcgtgaatacattccatcagttgaacaaggtcttaaagatgctatggaaaatggtgtcttagctggttatccattaattgatgttaaagctaaattatttgatggttcttatcatgatgtcgattcatctgaaatggccttcaaaattgctgcatcattagcgcttaaagaagctgctaaaaaatgtgatccagttatcttagaaccaatgatgaaagttactatcgaaatgcctgaagaatatatgggtgatatcatgggtgacgtgactgctcgtcgtggacgtgtagacggtatggaaccacgtggtaatgctcaagttgttaacgcatatgtaccactttcagaaatgtttggttatgcaacttcattacgttctaacacgcaaggtcgcggtacttacacaatgtactttgaccactatgcagaagttcctaaatcaattgctgaagaaatcatcaagaaaaataaaggtgaataa

SEQ ID NO: 7321 - DNA, 471 bp, Staphylococcus epidermidis; identical to SEQ ID NO: 3985

SEQ ID NO: 7322 - DNA, 414 bp, Staphylococcus epidermidis; identical to SEQ ID NO: 3986

SEQ ID NO: 7323 - DNA, 261 bp, Staphylococcus epidermidis; identical to SEQ ID NO: 3987

SEQ ID NO: 7324 - DNA, 3624 bp, Staphylococcus epidermidis; identical to SEQ ID NO: 3988

SEQ ID NO: 7325 - DNA, 3552 bp, Staphylococcus epidermidis; identical to SEQ ID NO: 3989

SEQ ID NO: 7326 - DNA, 735 bp, Staphylococcus epidermidis; identical to SEQ ID NO: 6670

SEQ ID NO: 7327 - DNA, 369 bp, Staphylococcus epidermidis; identical to SEQ ID NO: 3991

SEQ ID NO: 7328 - DNA, 501 bp, Staphylococcus epidermidis
atgtctgctatcattgaagcaaaaaaacaacaagtcgatactatcgctgaacaacttaaaaattcagtttcaacagttatcgttgactaccgtggtttaactgtagcagaagttactgaattacgttcacaattacgtgaagcaggtgttgagtataaagtatacaaaaacactatggttcgtcgtgctgctgaaaaagcaggtatcgaaggcttggatgaattcttaacaggtcctacagcaatcgcaacttctactgaagatgttgttgcaccagcaaaagttattgcaggatttgcaaaagaacatgaagctttagaagttaaaacaggcgttatggaaggtaacgttatctctgctgaagaagttaaaacagttggttcattaccttcacacgatggtcttgtatctatgcttttatctgtattacaagcacctgtacgcaacttcgcttatgcagttaaagctgttggagaacaaaaagaagaaagcgctgaataa

SEQ ID NO: 7329 - DNA, 696 bp, Staphylococcus epidermidis; identical to SEQ ID NO: 3993

SEQ ID NO: 7330 - DNA, 423 bp, Staphylococcus epidermidis
gtggctaaaaaagtagaaaaagtagttaaattgcaaattcctgcaggtaaagcgaatccagcaccaccagttggtccagcattaggtcaagcaggtgtgaacattatgggattctgtaaagaattcaatgctcgtacgcaagaacaagcaggtttaatcattccggtagaaatcagtgtttatgaagaccgttcatttacattcattacaaaaactccaccggctccagtactacttaaaaaagcagctggtgttgaaaaaggttctggtgaacctaataaaactaaagttgcaacagtaactaaagatcaagtacgcgaaattgctcaaacaaaaatgcaagacttaaatgctgcagacgaagaagcggcaatgcgtattattgaaggtactgcacgtagcatgggtatcactgtacaataa

SEQ ID NO: 7331 - DNA, 549 bp, Staphylococcus epidermidis; identical to SEQ ID NO: 3995

SEQ ID NO: 7332 - DNA, 186 bp, Staphylococcus epidermidis; identical to SEQ ID NO: 3996

SEQ ID NO: 7333 - DNA, 144 bp, Staphylococcus epidermidis; identical to SEQ ID NO: 3997

SEQ ID NO: 7334 - DNA, 576 bp, Staphylococcus epidermidis; identical to SEQ ID NO: 3998

SEQ ID NO: 7335 - DNA, 528 bp, Staphylococcus epidermidis; identical to SEQ ID NO: 3999

SEQ ID NO: 7336 - DNA, 768 bp, Staphylococcus epidermidis; identical to SEQ ID NO: 4000

SEQ ID NO: 7337 - DNA, 399 bp, Staphylococcus epidermidis; identical to SEQ ID NO: 6659

SEQ ID NO: 7338 - DNA, 1401 bp, Staphylococcus epidermidis
atgattacattatataataccttaacacgtcggaaagagacgtttgagcccattgaaccaggtaaggtcaaaatgtatgtatgtgggccaacagtttacaattatattcatattggaaatgcacgaccagctattaattatgatgtagtcagaagatatttcgaatataagggatatgaagtcatctatgtttctaatttcacagacgttgatgataaactcattaatcgctctaaagaacttaatgaaagtgttcctgaaattgctgaaaagtatattaaagctttttatgaggacgttggtgctttgaatgtgaaaaaggctacatctaatccgcgtgtgatgcatcatatgggtgaaattattgattttattaaagaattagtagatgaaggttatgcatatgaaagtgacggtgatgtctattttagaacacgtcaatttgatggatatggtaaattaagtcatcaatcattagatgatttgaaagttggcgctcgtattgaagctggagaacaaaaagaagatgcgctagattttactttatggaagaaagctaaaccaggtgaaattagttggaatagtccatttggtaaaggtagaccaggttggcacattgaatgttcagtaatggcttatcatgaactagggtctacaatagatattcacgcaggtggttcagatttacaatttccgcatcatgaaaatgaaattgctcaatcagaggctcataatcatgcacctttcgcaaattattggatgcataatggttttattaatattgataatgagaaaatgagtaagtctctaggaaatttcattttagttcacgatatcattaaagaagtcgatccagacgtattacgattctttatgattagtgtgcattatcgtagcccaataaactacaatttagaattagtaggtgcggcgcgaagtggtcttgaacgtatacgtaatagctacaagttaattgaggaaagagaacaaattgcctcagatttggaagaacaatcagaatatatacaacatatagataaaatactaaatcaatttgaaacggtaatggatgatgactttaatactgctaatgcagtaactgcatggtatgacttagctaaacttgcaaataaatatgtattagaaaatacaacttcaacaaaagttttaaatagatttaaagaagtgtacagcatttttagtgacgtccttggtgtaccacttaagagtaaagaaactgaagagttactagatgaagacattgaacaattgattgaggagcgtaatgaagcacgtaaaaataaagatttcgctcgagcagatgaaattagagatatgttaaaagcacgtcatatcattttagaagataccccccaaggtgtaagatttaaacgtggctaa

SEQ ID NO: 7339 - DNA, 642 bp, Staphylococcus epidermidis; identical to SEQ ID NO: 4003

SEQ ID NO: 7340 - DNA, 1455 bp, Staphylococcus epidermidis
atgagtgaacgcatcagagtaagatatgcgccaagtccaacaggatatttgcatattggtaatgcaagaacagcattattcaattatttatttgctaaacattataatggtgattttgttgttcgcatcgaagatacagatagtaaacgtaatttagaagatggtgaatcttcacaattcgataatctaaaatggttaggtttggattgggatgaatctgtcgataaagataaaggttttggaccttatcgtcaatctgaacgtgcagaaatctataatccactaattcaacagctattagaggaagacaaagcatataaatgttatatgactgaagaagagttagaagcagagcgtgaagctcaaattgctcgtggagagatgccaagatatggtggacaacatgcgcacttaacagaagaacagcgtcaacagtacgaagcggaagggcgtaaaccatcaattcgtttccgtgtgcctaaagatcaaacatatactttcaatgacatggttaaaggagaaatttcctttgaatctgacaatatcggagactgggtaattgtaaaaaaagatggtgttccgacttataattttgcagttgccgtagatgatcattatatgcaaatatcagatgttatacgtggtgatgaccatgtttcaaatacacctaagcagttaatgatatatgaagcatttggatgggaagcacctcgttttggtcatatgtcactcattgttaatgaagagcgtaaaaaattaagcaagcgagatggtcaaatcctacaatttatcgagcaatatcgtgacttaggatatcttccagaagcattatttaactttattacattgttaggttggtcacctgaaggtgaagaggaaatcttttctaaagaagaatttataaagatttttgatgaaaaacgcttgtctaagtctccagctatgttcgatagacaaaaacttgcttgggttaacaatcagtatatgaaaacaaaagatacagaaacagtattcgaacttgcattacctcatttaatcaaggctaatcttatacctgaaaacccatcagaaaaggatagagaatggggacgtaaattaatagcgttgtatcaaaaagaaatgagttacgctggtgaaattgttccattatcagaaatgttcttccatgaaatgccggaacttggaaaagatgaacaagaggtattacaaggagaacaagtgccagaactaatgaaccatttatatggtaaattagaatctttagaatcgtttgaggcaactgaaattaagaaaatgattaaagaagttcaaaaagaaactggtattaaaggtaaacaattatttatgcctattcgtgttgctgttactggacaaatgcatggtcctgaattacctaacacaattgaagtattaggcaaagataaagtattgtcacgcttaaaaaaccttgtttaa

SEQ ID NO: 7341 - DNA, 1059 bp, Staphylococcus epidermidis; identical to SEQ ID NO: 4005

SEQ ID NO: 7342 - DNA, 1374 bp, Staphylococcus epidermidis
atggccaagaaaaaagtaatattcgaatgtatggcatgtggctatcaatctcctaagtggatgggcaagtgccctaactgcggtgcgtggaatcaaatggaagaaatagtagaaaaggttgctcatcctaaacatggtgtaaaaacaaaagaaacagcaggtaaggtacaaaagttaaatagtgttaagcatgaagctacccctagattacttacagaatcaaaggaatttaaccgtgttttaggtggaggtattgtaagtggttcgttagtactaataggtggagacccaggtattggtaagtcgactttattgctacaaatttgtgctgcgctgtcacaaaataagaatgttttatatattactggtgaggaatctattaatcaaactaagttgcgcgctgatcgtttagaagaagattctagtcatcttaatgttttagctgaaactgatttagaagtgatacatcaaactgtaaaagaagagagacctgacttacttgttgttgattcgattcaaacaatctatcatccggaaattagttccgcacctggatcggtatcacaagtaagagagagtacgcagagtttaatgaacattgctaaacaaatgaatattgccacatttattgtgggacacgtaacaaaagaaggacaaatcgccggaccaagattattggaacatatggttgatacagttctttattttgaaggagatgagcatcacgcatatcgtatccttagagcagtaaaaaatagatttggttctacaaatgagatggggattttcgaaatgaagcaaagtggattaaaaggtgtacttaatccttctgaaatgtttttagaagaacgttctacaaatgttccgggctctacaatcgtccccactatggaaggaacaagaccactactcattgaagtccaagcgcttgttacaccaacaacatttaataatcctagacgaatggctacaggtatagatcataatcgattaagtttacttatggcggttctagaaaaaaaggaaaactatttactccaacaacaagatgcctatattaaagtagcaggtggcgtcaaattaacagaacctgctgttgatttaagcattattgttgcgacagcttcaagttttaaagatcaagctgttgatggattagattgttttgtgggtgaagttggattaacaggtgaagtacgcagagtatctcgcatagagcaacgtgttcaagaagcggccaaactagggtttaaaagagctattattccacagacaaatattggaggttggacattcccagaaggcatccaagtcgttggtgtttcatcagtacatgaagctttgaaatatgcattacattcaaaacagcgataa

SEQ ID NO: 7343 - DNA, 2454 bp, Staphylococcus epidermidis; identical to SEQ ID NO: 6653

SEQ ID NO: 7344 - DNA, 1005 bp, Staphylococcus epidermidis; identical to SEQ ID NO: 4008

SEQ ID NO: 7345 - DNA, 576 bp, Staphylococcus epidermidis
gtgaggtgtttaaaattgctttgtgaaaattgccattttaatgaagcggaagttaaacttactgttaaaggtatagatagtacgcatgaaaaatgggtatgttcagtatgtgcccaaggagaaaacccctggttacattctaacgatgataatacgtatcatacacaccaagacgatatagaagaagcatttgtagtgaaacagatacttcaacaccttgctgcaaaacatggtattaattttcatgagatggcatttaaagaagaaaaaaatgcccaacgtgtcagacacttaaggatattgcacatgttggtaagcttgggtgtggctgattgttatgctacgtttaaagaagacatcattgatatagttcaacgtgttcaaggtggtcaatttgaacatgtaggaaaaacaccacaatcatcgtataagaaacttgcaataaaaaagcaaattgaagaaaaatcaaaatatctaaataaattgatagatggtcaagagtttgaagaggcagcgattgttcgtgatgaaattaaagctttaaaaagtgagagcgaggtgtctcatgatgagtaa

SEQ ID NO: 7346 - DNA, 462 bp, Staphylococcus epidermidis; identical to SEQ ID NO: 4010

SEQ ID NO: 7347 - DNA, 1215 bp, Staphylococcus epidermidis; identical to SEQ ID NO: 6649

SEQ ID NO: 7348 - DNA, 447 bp, Staphylococcus epidermidis; identical to SEQ ID NO: 3767

SEQ ID NO: 7349 - DNA, 1650 bp, Staphylococcus epidermidis; identical to SEQ ID NO: 3766

SEQ ID NO: 7350 - DNA, 126 bp, Staphylococcus epidermidis; identical to SEQ ID NO: 3765

SEQ ID NO: 7351 - DNA, 1167 bp, Staphylococcus epidermidis; identical to SEQ ID NO: 6732

SEQ ID NO: 7352 - DNA, 759 bp, Staphylococcus epidermidis; identical to SEQ ID NO: 3763

SEQ ID NO: 7353 - DNA, 687 bp, Staphylococcus epidermidis; identical to SEQ ID NO: 3762

SEQ ID NO: 7354 - DNA, 1404 bp, Staphylococcus epidermidis; identical to SEQ ID NO: 3761

SEQ ID NO: 7355 - DNA, 141 bp, Staphylococcus epidermidis; identical to SEQ ID NO: 3760

SEQ ID NO: 7356 - DNA, 1008 bp, Staphylococcus epidermidis; identical to SEQ ID NO: 3759

SEQ ID NO: 7357 - DNA, 1236 bp, Staphylococcus epidermidis
atgacaaatggacctattcaagttaacagtgaaatcggcaaactaaagacggtattacttaaaagaccagggaaagaattagaaaacttagtgcctgattacttagatggattattgtttgatgatattccatttttaaaggtagctcaacaagagcatgatcattttgctcaagttcttcaagatgaaggaatagaagtgctttatttagaaaaattagcagcacaaagtatagaagattcaaatgtcagagagcaatttatagatgacgttttagcagaatctagaaaaactatcctaggtcatgaaaaagaaataaaaaaactcttttcaactttgtcaaatcaagcattaattaataagattatggctggcgtacgcaaagaagaaatacaacttgaatcgacacatcttgtagagtacatggatgataaatatccgttttatcttgacccaatgcctaatctatatttcacacgtgatcctcaagcttcaattggtagaggtatgacagtaaatcgtatgttttggagagcgagacgcagagaatcgattttcatttcatatattttaaaacatcatcctagatttaaagatgagaatattcctttatgggtggatcgtgactgtccgttcaacattgaaggtggagacgaactggtgttatctaaagatgtacttgcaatagggatatctgaacgtacttctgcacaagcaattgaacgtttagcacgacgtatttttaaaaatccgttatctacttttaaaaaggtggtggcgattgagattccaactagtcgaacatttatgcacttagatactgtttgtacaatgattgattacgacaaattcactacacattcagcaattcttaaatcagaaggaaacatgaatatatttattatcgaatacgatgataaagctgaagatatcaaaatccaacgttccagtcatcttaaacaaacattagaaaaagtgctcgatgttgatgaaattacattaataccaactggaaatggtgatatcatcgatggtgctcgtgaacaatggaatgatggttcgaatactttatgcatccgtcccggtgtggttgtaacttatgatcgtaattatgtttctaatcaattgttatgtgagcatggtatcaaagttattgaaattcctggaagtgaacttgtacgtggtcgaggaggccctcgatgtatgagtcaaccattaataagagaagatctatag

SEQ ID NO: 7358 - DNA, 462 bp, Staphylococcus epidermidis; identical to SEQ ID NO: 3757

SEQ ID NO: 7359 - DNA, 1524 bp, Staphylococcus epidermidis
atgaagaatttttctaaattcgcacttacaagtattgctgcattaactgtggcaagtcctttagtcaatacggaggttgacgctaaggataaagtatcagcaactcaaaacatcgatgcgaaagtaacccaagaatctcaagcaactgacgcattgaaagagttaccaaaatctgaaaatataaaaaagcattacaaagattataaggtcactgatactgaaaaagataacaaaggatttacgcattacacattgcaaccgaaagtgggcaacacgtatgcaccagacaaagaagtaaaagttcatacgaataaagagggtaaggtagttcttgtcaatggtgatactgatgctaagaaagttcaacctacgaataaggtatcgataagtaaagaaagtgccacagataaagctttcgaagcaataaaaattgaccgtcaaaaagctaaaaacttaaaaagtgatgtcatcaaaaccaataaagttgagattgatggagaaaaaaataaatatgtatataacatagaaattattacaacttcaccaaaaatctctcattggaatgtgaaaattgacgctgaaactggtcaagtggttgataaattaaatatgatcaaagaagcagctactacaggtacaggtaaaggtgtactaggtgacacgaaacaaattaatattaatagtgtcagcggtggttatacactacaagatttaactcaacaaggtacactttcagcttacaattacgatgcgaatactggtcaagcttacttaatgcaagataaagataaaaattttgttgatgatgaacaacgtgcaggtgtagatgcaaattattatgctaaagaaacgtatgactattataaaaatactttcggccgagaatcatatgataatcaaggtagcccaattatttcaatcgcacatgtaaataacttccaaggtcaagataacagaaacaatgcagcttggattggtgataaaatgatttacggtgacggtgatggacgtacatttacagcgttgtctggtgcaaatgatgttgttgcacatgaaattacacatggtgtaacacagcaaactgctaatcttgtttaccgttctcaatcaggtgcattaaatgaaagtttttcagatgtatttggttacttcattgatgatgaagatttcttaatgggtgaagatgtttacacacctggtgtaggcggagatgccttaagaagtatgtctaatccagagcgttttggacaaccatctcatatgaatgattttgtttatacaaattctgataacggaggcgtacatacgaattcaggtattccgaacaaagcagcttacaacacaattcgtagtattggtaaacaacgttctgaacaaatttattatagagcgttaactgtttatttaacttcaaattctgatttccaagatgccaaagcatcattacaacaagcagcatttgatttatatggcgacggtattgctcaacaagtaggtcaagcatgggacagtgttggcgtgtag

SEQ ID NO: 7360 - DNA, 1263 bp, Staphylococcus epidermidis
atgaaaggcggtatcatgatgagcgtattatctaatgaagaaagagttgaaattttatccgatatagtctcaataaaaactgtaaatagtaatgaattagaggttgcacagtattttgaaagactatttagtcagtatggaattcgttcatatatagatattgttgcagacgggcgagcgaatttaatagcaacggttggttccagtcatccagttattgggatatctggacatatggatgttgtatctgaaggaaatcatgatgattggacgtatgatccttttacactaacagaggaccaaggctatttatacggtaggggagctgcggatatgaagtctggattagcagctttagccattgctcttattgaaattaaagaaagtggtaagttaacacagggaactattaaattcatggcaacagtgggtgaagaaatggaacaatcaggttcgcaacagttgtttgaaaaaggatatgctgatgatttagatgccttactcatagcagaaccatcatttcctagtttggtgtatgcacataaaggttcaatggactttagaataaaatctaaaggacgtgcttcacatagttcaataccatttttaggacaaaatgctattaaaccattattagagtttattcaaaatataaatcaagaatatgaaaaaataatgcaaacagtaaaaggtgagtccttagatttttcaaatatgattaataaattagagaatcaattacctagccatataacaaaagaaaaagcacaagagcttatacagggacttgttatgacaaatagtatcgttcaaggtggcacacaagtaaattcagtaccagattttgctacagctgaatttaatgtacgcacaataccagaatataataataacaaagtaaaagcgctatttaataaatatgtagagcaagcaaatcacaatggtgctagtttgactcaagaactttatcttgatttagaacctgtagtaacaacaggtcaaaatcgcttggtagagctaggatttgatattgcaaaaagccatttttctaacgaaagagatttaatcattactcctactgtagcagttactgatgcttccaacttattaaaaggaaaagatgaaaattttccatttttaatgtttggcccgggaaatggacctcatcaaataaatgagtgcgtagaaaaagccaattatttagaatttgtggaatactatatagagtttatcacttcatatttaaatgaagagaatgagtaa

SEQ ID NO: 7361 - DNA, 504 bp, Staphylococcus epidermidis; identical to SEQ ID NO: 3754

SEQ ID NO: 7362 - DNA, 927 bp, Staphylococcus epidermidis
atgagaaaactgatatctaccattatcgtttcaacattattaattggaggatgttccacggtgcataaagaagcaaaacatacatcacaatcaattcctgaagaagttcccgcaagtcaatacaaaggtcaaggtttccacaaacagctgaaaaaagtgctatcgcacatgcgaaaaaaccatcgtgaagaatacgaaaaacttggcgaacaattttttaaagataattttagccttaatgttaaagccacaaatgttgtaggaagtggtgatggcgtcgaagtctacgttcattgcgatgatcatgacattgtgtttaatgcaagcatcccttttgataaggaagcaatacatgaagaaggctccatgcgaagcaatgataatggagataccatgagtaatatggttggaactgtgttaagtggttttgaatataaagcacaaaaagaaaaatatgataacttaacaaagttctttaaaaacaatgaagaaaaatatcaatataccggttttactaaagaagcaatacataagacacagaatgttggatatcaaaataattacttttacattactactagttccacgaaattacgagattatagaaaacattttgaacctttaattaaagaaagtaacgatgattttagaaagcatatgaaacaattaaagtctaaaaaagatacgtatcttaatacagaaataacaactacacttttcagtactcttgatgaatatgacgaaaaaatcattagaaaaaatagtatatccatggctaaagaaataagaaaagagccatctattccacataatttcacattccacttattatttagcaataacaaattaaaaatcaacgatccaaacataaataacaatcaaattaatgagtatggggtgttccaccatgacggatttaaaaattaa

SEQ ID NO: 7363 - DNA, 120 bp, Staphylococcus epidermidis; identical to SEQ ID NO: 3752

SEQ ID NO: 7364 - DNA, 780 bp, Staphylococcus epidermidis; identical to SEQ ID NO: 3751

SEQ ID NO: 7365 - DNA, 135 bp, Staphylococcus epidermidis; identical to SEQ ID NO: 3750

SEQ ID NO: 7366 - DNA, 1872 bp, Staphylococcus epidermidis
gtgattgatagacaaatcaaactcatcaaattgttattaaattatacagatacgtatataagtggctatgatattgccaaacagttaaatgtatctaatagaactatacgtaatgatattaaaactatacatactacatttctaaatgaattaattttaagtgtacaatctaaaggttatatgctaaatacatgtctttatacacctgatgagatacaatctgctttagagtcagttattgtaaaagagaataaattgcttatcacaattgcttataggttatttatggaaaagcatacattcactatcaaagagctatcttcaacttaccatttaacaaaatcaaaagtgattgattatgtaacacgtatacaaacgtgggctataaaatttgatatttatttatcaataaaaaagaagcaaggtatcatgatcgatgcgagtacaacgagtatcagtaatgctgtacttcatatcaatcaacttacagacgatgactttaaagttgaaaaccttattttacaagagttacctcaagcccatactagaaaaataaaacaaattatctcaaagcatatagataatcatcaattatcaacttctgaaaataaaatacaacaattacttgtgcatctaattttaattatcaaacattctcaaccagaggaagaagattggagcactgatacagaatctttaactattgcgaaaaagtgtataaaagatatcaatgaaacccttggatatcaacttaacaataaaacaagtgaatgcttttccttttttattagctaccatttcaataagtttgatttagggatccaacaactatttattcaaagttatatcgatcgactcattgaattaatggagcaacatattggttttcccttttcacaagatacaattttaaaagataatatgaacgtccactttagtcgtacatatttgcgattaatgagtcatgtttatctaaataatccattaacaagtcaaatcaaacgactatatccctttgtctttaatacactatatgatagtattcgacaattatcacaagataccaatatccaattaagcgaagatgagattgcctttttaactatacattttcagtcttctatcgaacgccataagtcatcacatattcatgttgtaattgcttgttattatggcttaggcatttcaacgttgcttgctgagaaaatcaaacaacttaatcatgcaatacagatcgtagatacattaaaacttgaagatattaacaactatcattttgaagggattgacttattaattactactcacgactttgatacaagtcaacttttacaaatacctaaagtcatacaagtatcacctttattttcagatgaagatgctaaaaaaatcgaattctttgtaaaagacatgcaaaacccattatcaaaagatgatatattatcaaaaattcagttgagtgttgagtccaatttcaaaatgaatcattcaaatcacattcttccaatttttgagaaatccaaagaaattttagattatcatcatgcaactctagatggctatatagaaagtgccatagatcgcgaaaaacaatcttcaacatatataggtaaagggatagcactcccacacggcaaccctgaaaaagtactgaaatcacacatgattatatttaaaccttctcaacctataacatggaaacaacatgaagttaaacttgttttctttttagcaatgagtaaaaaagatttaaatattaaccgtaaaattatacaaacaattgctcaattagaagaagatgacatccatcaattatgtcttttagatgatttacaactaaaaaacactttgtatgcacgttttaaagaataa

SEQ ID NO: 7367 - DNA, 1941 bp, Staphylococcus epidermidis; identical to SEQ ID NO: 3748

SEQ ID NO: 7368 - DNA, 951 bp, Staphylococcus epidermidis
atggtactttttcttcaacccgtatttcaagaacgtttatggggtggcaccaatctcactcaatttggctacgatattccgaataattctaccggcgaatgctgggcaatttccgcacataaaaacggtcctaacacaattctcaacggaaaacataaggggaaatctttaaaacaagtttgggacgaagataaagcacttttcggaaatgactcacgtaaagattttccacttctcactaaaattttagatgcacatgattgtttgtcagtacaagtacatcctgatgatgaatatgcgcttaaacatgaaggcgaatacggtaaaactgaatgttggtatattttagacgctcaacctggtgctgaaataatctatggtgttaatgctacaagtaaaaatgaacttgaacatatgattgatcatcatcaattcgactatttatttaaacatgtacctgttaaaccgggtgatttcttttatgtaccagccggtacagttcatgctattggttccggaatcctcattttggaaactcaacaatcttcagatacaacatatcgtatatacgattatgacagaaaagataaaaatggtcatacgcgtgaattacatttaaaccaaagtaaagatgttattgatatcactacaactgaacctaatacaacacctaagactgaaatgataaatggcaattgtcacactcaatttgttgccaatcatttctttacggttgaagaatggtctatcaaagacatattagattttcaaaaaccacacacttattgcctagtgtcaatgattaacggccacgggcaagtttcaatcaataacaaagtatataaaatcgataagggcgatcattttattttaacttctgaagatcaatatattaaatttgttggtaatatggatttaatagtcagttttagtaaagatgaggcatattaa

SEQ ID NO: 7369 - DNA, 2859 bp, Staphylococcus epidermidis; identical to SEQ ID NO: 3746

SEQ ID NO: 7370 - DNA, 1968 bp, Staphylococcus epidermidis
atgaagaaaaataaatttttagtatatttactatcgacggcgcttatcacgccaaccttcgctacacaaacagcttttgctgaagattcatctaataaaaatacaaattcagataaaatggaacaacatcaatcacaaaaagaaacatcaaaacaatctgaaaaagatgaatttaacaacgatgattctaaacacgattctgatgataaaaaaagcacttctgacagcaaggacaaagactctaataaaccattatcagctgactcaacacatcgtaactataaaatgaaagatgataatttagttgatcaactttatgataattttaagtctcagtcagtagatttttctaaatactgggaaccgaataaatacgaagacagttttagtttaacgtcactcatccaaaatttatttgattttgattctgatataacagattacgaacagccacaaaagacaagccattcttctaatgacgaaaaagatcaagtagaccaagcagatcaggcaaaacaaccatcacaacatcaagaaccatcacagtcgtctgctaaacaagatcaagaatcatcaaacgatgaaaaagaaaagacaactaaccatcaagccgattctgacgtcagtgatttacttggagaaatggataaagaagatcaagaaggcgaagacgtagatacaaacaaaaatcaatcttcttctgagcaacaacaaactcaagcgaatgatgatagctcagaacataacaagaaatattctagtattacagattcagcattagactctatattagatgaatatagtcaggacgctaagaaaacagaaaaagattacaataagagcaagaatacaagtcacactaaaacatctcaaagtgataatgccgacaaaaatccacaattaccaacagatgatgaattaaaacatcaatcaaaacctgcacaatcatttgaggatgacattaaacgctcaaatacacgttcaacaagtcttttccaacaactacctgaattagacaatggtgacttatcttctgattcatttaatgttgttgacagtcaagacacacgtgatttcattcaatcaattgctaaagatgcgcatcagattggaaaagaccaagatatatatgcatcagttatgattgctcaagctattttagaatctgactctggaaaaagttcacttgcacaatcaccaaatcataacttgtttggaatcaaaggtgactacaaaggacaatctgtaacttttaatactttagaagctgatagcagtaatcatatgttcagtatccaagcaggtttccgtaaatacccaagtactaaacaatctcttgaagattatgcagatttaatcaaacatggtatcgatggtaatccgtcaatttataaaccaacttggaagagtgaagctctatcatataaagatgctacttcacatctgtcacgctcatacgccacagatcctaattattctaaaaaattaaatagtattattaaacattatcatttaacatcttttgacaaagaaaaaatgcctaacatgaagaaatacaacaaatcaataggtacggatgtctctggtaatgacttcaaaccatttactgaaacttccggtacatcaccttacccacatggccaatgtacttggtatgtgtaccaccgtatgaatcaatttgatgcatccatttctggtgacttaggtgatgctcataattggaataatcgtgctgaaagtgaaggctatacggtaacgcacacacctaaaaatcatactgcagttgtgtttgaagctggacaattaggtgctgatacacagtatggtcatgttgctttcgttgaaaaagttaatgacgacggttcaattgttatttctgaatcaaatgttaaaggattaggtgtcatttcattcagaactattgatgcagaagatgctcaagatttagattacattaaaggtaaatag

SEQ ID NO: 7371 - DNA, 2031 bp, Staphylococcus epidermidis; identical to SEQ ID NO: 6712

SEQ ID NO: 7372 - DNA, 429 bp, Staphylococcus epidermidis; identical to SEQ ID NO: 6711

SEQ ID NO: 7373 - DNA, 177 bp, Staphylococcus epidermidis; identical to SEQ ID NO: 3742

SEQ ID NO: 7374 - DNA, 117 bp, Staphylococcus epidermidis
atggaaacttcagttcttatccccacaaatgatatttcacgacatgtaaatgttattgcagaaacaattcccgagactgaattcgataaattcagacattatcgttgcttaatataa

SEQ ID NO: 7375 - DNA, 690 bp, Staphylococcus epidermidis
atgaattattcaccaaaacaaggtgttaaaagtcatggattgccacatgatccgttcaaaagtagcacagtacctagacctataggttggatttctacagtatctaaagaaggtaaagataactttgcgccgtacagtcaatatcaaaatcttacatgggatcccccaatggtaatgtttgcggctaatcagtcagtgcttggcgatcatgaaagaaaagatacagttaaaaatgcggaagaaactggttggtttgtatggaatatggcaacatatgatttgcgtgaagcagtgaatttatcatccaaagcattacctccagatgatgatgaatttgactttgctggtgtgacgaaagaatcgtgtatcgaagctcctggaagtagggtaaaggaatcacctgttcattttgaatgtgaatatgttcaaacagtaagaattcccactggagaccctgtttcaactgtggatatagtcatcggtcgtgtagcacaagtgcatattgacgataaagtaattatggacaacggaaaattagacattaagtcaatcagacctatagcacgtctcggttattatgattacacggttgtcgatgaaatatttgaaatgaaagcacctgcagcttcgaaagaagaattggctggacttgaaggtcgaaattttgacaacactaataatgaatcatga

SEQ ID NO: 7376 - DNA, 1173 bp, Staphylococcus epidermidis
atggaagaaagtaaaaactataatctcattacgacaatcatgtttatttcaggtatcattgtaatggcaagtttatatacggctctacctcttacagcaactttcgcagaagactttcatgttcctgaatctatagcaactttaaacggtgttttattctcattaacatattcaatcagttgtctattttatggaacgatttctgaaaagtatggcagaattaaaactattttagtaggtatgagtgcattagttatcatctgtcttatgataggtattgttcattcatttacagtgttattaatattaagagcactacaaggcgtatttgctgcatcattttctcctgtagtcatgacttatacaactgaaacttatccacgtgtgaaacgtgtaacagcaattagtttcatcagtacaagttttatgttatcaggtgtgttagggcaaaatatgagtgaattagtcgtaagttatttgaattggcagtgggtatattttattttaacaatcttatatttaattctcgtattagttatttataaaaatgtacctgagagtccacataaaaatcctgatattcaactcattaagtttttcaataactttaaagatttcaaagacaatcttaaagttttctattgtttatttatttcactaacattactgattatgtttataagtatgtatgatattttaaatgaatatgtcacatcacaccaagttgggggagacatgtctgtgtcctcaatgatgaaattgttcggtgtgataggcatgttattatctctattagcagggcgtgtaagcagtcgtataggtataaagcgcttgctaactatcgcattaacaacatgtattgtgtcgatcatactcatgggtgtaactacgaatattatacttattacaacatttagtgtgttgtttgttgcaggtatcgcatttgcgattcctactgttatttcaaaaataggtgtagttgttaaaaacaatcaaggtttctttttatctgttaatacatttgtattattcttaggaacagcgattgcacctattttaatgttatttgtaggcgaactgtctaactttttcttacagtttttaatgattgctattgtcggactgattgctttagttgtatcaatatttatgccaggtgaccaacgttcttga

SEQ ID NO: 7377 - DNA, 357 bp, Staphylococcus epidermidis; identical to SEQ ID NO: 3738

SEQ ID NO: 7378 - DNA, 480 bp, Staphylococcus epidermidis
atggaaacggtatattttgctggtggatgtctatggggaactcaagctttttttaatacgattccaggagttattcaaacagaagctggaagggcaaatggaacgtcgaaatgtttagatgctccttatgatggctatgctgaatgtgtgaagatacactttgatcctgcaaaaacttcaatacttatgctgatggattatttgtttgaaatgataaatccttatagtttaaatcaacaaggtcaagacaagggtcaaaaatatcgaacaggtgtgtatagtgaaagttcgaagcatttaaatgaagcaaaagactacattaagcgcagggaagacgcgaaacaagtaatggtcgaagtacaacctctaagtaattatgtgaagagtgcagaagaacatcagaatcatcttgagaaatttccggaggattattatttatgtcatgttcctccagcattgcttaataaatacaagaaataa

SEQ ID NO: 7379 - DNA, 348 bp, Staphylococcus epidermidis; identical to SEQ ID NO: 3736

SEQ ID NO: 7380 - DNA, 1341 bp, Staphylococcus epidermidis
atgattaatttattcgaaaattataatcaagaaacacaggaattacatcaatctcttaagcgtgctggttacaatcactttacgattgtaattaatgatgatggatttttacctgatgatgtgacatcgccgtatcgttttttcacagcatatcaaatttatgaagatgatacccctgctttttttaatgatattgatacgccgcctttttgggaaattaaaggagatgcgacaatggctaccattacagatatgggtgagcttagaggtaaaatcttttataaggaacattataagacacgtgtagttagccatgtagagtggcttgattcaaaacagcgtttgcgttcggttgattattatacaaaagaaggatttaaatttgctgaaacagtttacgatttgttaggtaatgcaatattaaaaaagtatatgacacgtgaaggtaaagaagtgatttatgagaattatgtaactaacgatgtagttgtagaatatgaagggaaatcttatttttttgagtcatatacagagtggattaaattttacttgagtgaaatgggcattgagataaaagaagttatatttaatactttatcaacaccatttttagcaatttatcatttgccgacattgaaaaaaggtattttattttggcaagaacaatctcagggttatgtcccaggaaatatgaaagtcatgttatcaccaaaccttcaaagtcgctttgccgttattgtccctaatcagaatgaatacaaattgatcaaggaacaactatctagggaggaacaacaggcagtatatgcatctggttacttatatgacacgtataaacggaatcattattctaagaatgtattaacattaacaaattcagatcaaataccacatgttgaaacgttggtacgtttgcataaagattatcaatttcacataggcgctaaaactgagatgtcttcaaaattattaagtttatcgcaatatgaaaatgttaaattatatccaataattaaagaacaaacagttcaaaccttatatcaacaatgtgacatctatttagatattaatgaggggaacgaaatagggaatgctgtaagaagcgcatataatcatcaattgttaattatgggatataaagaggttgttcataatcaagatttcgttgcaatagaaaatcagtttcttgtaaatgatataagtcagttgagtaacgctttgaaagagataggaaatcatcgtggtcaatttgaaacacgtttagcactacaacaacgtcatgctaatgctgtgccggtatcaacatttaaatacgcattagtacaagcattaagtggttaa

SEQ ID NO: 7381 - DNA, 1509 bp, Staphylococcus epidermidis; identical to SEQ ID NO: 3734

SEQ ID NO: 7382 - DNA, 2391 bp, Staphylococcus epidermidis
atggctaaaggtgttaaccaaattattaataatattaggttaagaaaattgcgcaaaatattaaatcaaattaatgcgcttagtgaggagttctcaaattttagtgatgaagcacttcaagcgaagacaaaagaatttaaagtttatttaaatgataataaagcttcactcaatcacattctgccacaagcttatgcaacagttagagaggcttctaagcgcgttttaggtatgtatccaaaagatgtgcagattttaggagcaatcgctatgcatcaggggaatattgcagaaatgcaaacaggagaaggtaagacgcttacagctaccatgcctctgtacttaaatgcacttacaggtaagggtgcttatctaatcacaacaaatgattacttagcaaaacgcgattttttagaaatgaaaccactatatgaatggctaggcttgtctgtatcattaggatttgtggacattccagaatatgaatacgctgaaaatgaaaaatatgaactgtaccaccatgacattgtttacacgactaatgggcgactagggtttgattatttaattgataatttagctgatgatattcgtgccaaatttttaccgaaattaaactttgctattattgatgaagtcgattctattatattagacgctgcccaaacgcctttagttatttctggtgcaccacgtgtacaatctaatttatttcacatcgttaaaacgtttgttgaaacacttgagaaagataaagacttcatagttaattttaataaaaaagaagtgtggctcactgatgagggctcggaaaaagcaagccattatttcaaagtgaatagtatataccaacagcaatattttgatttagttaggatgattcatttatcgcttagagctaagtatttattcaaatataatttagactattttatttttgatggtgagattgtgcttatagatagaataactggtcgtatgctacctggaacaaagcttcagtctggtttacatcaagctatagaggctctggaaaatgttgaaatttctcaagatatgagtgtgatggcaaccataacattccaaaacttatttaagcaatttgatgaattttcaggtatgactggaacaggtaaattaggggaaaaagaattctttgatttatattcaaaagttgttatagagattccgactcacagtccgattgaacgagatgatagacctgatagagtatttgctaatggtgacaaaaagaacgatgcaattttaaagacagtgattggtatacatgaaactcaacaacctgtgttactaattacacgtactgcagaagcggcagaatatttttcagctgagttatttaaacgtgatatacccaacaatttattaatcgctcaaaatgtagctaaagaggcacaaatgattgctgaggcgggacaattatctgcagttactgttgctacaagtatggcagggcgtggaactgatataaagttatcaaaagaggttcatgatatcggtggcttagcagtgattattaatgaacatatggataatagccgtgttgatcgtcaattaagaggacgctcaggtcgccaaggagatcctggatattcacagatttttgtatcacttgatgatgatttagtaaaacgttggagtaactctaacttggcagaaaataaaaacctccaaacgatggatgcatctaaactagaaagtagtgcactctttaaaaaacgtgtaaagtcaattgttaataaagcgcaacgtgtatctgaagagactgctatgaaaaatagagaaatggcaaatgaattcgaaaaaagtattagtgttcaacgagataaaatttatgctgaacgtaatcacatacttgaagcaagcgattttgatgattttaattttgaacagcttgcacgagatgtgtttacaaaagacgttaaaaatcttgacttaagtagtgaacgtgcacttgtgaattatatatacgaaaacttaagttttgtcttcgatgaagatgtatcaaatattaatatgcaaaatgatgaagaaatcatacaattcttaatacaacaatttactcaacaatttaacaatcgtttagaagttgctgctgattcatatttaaaacttcgtttcattcaaaaatcaattttgaaagcgatagatagcgaatggattgaacaagtagataacttacaacaacttaaagccagtgtaaacaatcgacaaaatggacagcgtaatgtcatttttgaatatcataaagtggctcttgaaacgtatgaatatatgtctgaagatataaaaaggaagatggttagaaatttatgtttaagtattctagcctttgataaggacggagatatggtcattcatttcccataa

SEQ ID NO: 7383 - DNA, 573 bp, Staphylococcus epidermidis
atgcaagaagataggaaatttgaagtcaaatggcgactagttaattcatcaacttttatgtatggtacaaaattacgttttaatcaagataatatctattttgagaaccctttgatgccatccggtacaatcattcacagttggtatatgttaactgattttgcagaagaccgtgtaagccctaagctacctattttaaaaaaagggcgccaatatcaatttcaatttaattttgaagttgaacctgagggtgcggcttattttaaaatgaaattttatcgtaagaataaagaaattcttagtcatcaaattctaaaaaataaaaaagaaaatattgtctatcctagagaagcatattcatatgaattagaacttattaatgctggcatgaatcatctatcttttcacaatataattgtgcaagaattaagagaagatagtaatcaagcttatgaggcaacgcaatatatagatcctaagaaaaaacttaaagtaattaatcaaataataaccaatataaggacacatcatctagacacatcaaactatcacaggagtgatacgaatggctaa

SEQ ID NO: 7384 - DNA, 1560 bp, Staphylococcus epidermidis
gtggcacgtaaatttagagtacttcaagtaggtggtcatgatttaggttctttatttaatcaaaaaagtaatgtcgaatgggattattttgatgttggtttgtttgattttgaaagtggctatcaagatgttgtagtacatattttagatgaaaaaggacaatttgattttgtttttgtacgtgaaaaatattctgattcattaatgaaacttttatcattagtcagtacaccgtataatactgtgattgacaatgagtattgggataatcaataccaacaagataagacaatacaacgtaattttataaaaccactcatttatgaaaatgaagaacaattacaacaaaaactagaggcagttacatttcctgggcaatatggagataaagttaaacctattcattgtcgcgttagtattcattttgatggttcttatcaatttaatggaaatgagtctattgaagtatcaggacgatttggggaatcataccaacccctcattacatggagtcaaaatatcattgctgatgccaataaggtgaatcaaatatggccagaatttaaagttgaaggtgatgctaaaatccaatatacattgagattgacgcctgtttattcaactgatcaaccagtagaaaagctaatatatgaacaagacgatttagacactcccatagaactacctgctcgtccttatcaaacatatgtgagtgtatcaatcaaagctaaaggtaaaggaacattatttataggtgctattcataaacgttggtcacgcttggaattagggcagttcatattaggcggaaaacgatatagtgatgaaaataagcaagaatttatacattacttccatcctggagatttaaaaccaccactcaatgtatattttagtgggtatcgtactgctgagggctttgaagggtactttatgatgaaacgtatgaatgctccatttattttaatagctgatcctagaatcgaaggtggtgccttttacctagggtcagagaattatgaacaggcaatccgtaaggtcatccaaaatgctttggattatttgggatttgcgaacaaccaattaattctttctggattatcaatgggatcatttggcgcactttattacgctacaaaattaaatccagcggctgttattgtaggaaaacctttgataaatctcggtactattgctaataatatgaaactcgttcgtccaaacgattttggaacgtcacttgatattttgcgattgaatcaaaatggcataactaacaaagatgttgttcagttagataatcatttttggaagcaaattcagcatagtgatttgtcaatgaccacatttgcgattgcttacatggagcatgatgattatgacaaatatgcatttcaagatttattgcctgttcttacaaaacaacatgcacgtgtgataagtaaaagaattcctggtagacataatgatgattctgctactgttactcattggtttattaatttttatcatttaatcatggaagagcgatttgggagggtaacacatgcaagaagatag

SEQ ID NO: 7385 - DNA, 1557 bp, Staphylococcus epidermidis
atgaaacgatttataccagcttggtatagccgtaacagatggtgggaaagtacctcaagaccattctatctaaaaaaacagtatacagattttgacgatatgattagtttaatgacaatgcatagttcgaataatgtggattatcaattgatagttttaaattttagtccatatcttagaacattcctccatcgatatgatttgtatgaaagtcattattggtctgtatttgatgagatacagggcgttggacatcaaacgcctcaagctattgattatcgcgatctttcatggccagaaggcactgaatttatttttactccctttcaaattcaagcgattacaggtgataacacgttttctaaaattcacttcagccaagaggggtacctgatgtgggtagaggattacaagtatagtacaattcaaagacgatttgtattcgatgacagaggatttatatcggcagtgcgtacttatacacctgatggtgataacaataaaaaacactatttttcaaaagatggggaagaaatatttgttgaagacttaaatgttaatacagtaacgattaataaaaatttccaatcaaaatttaaaagggttacgtattcatctatggctgagttgatagaagagaaattccaatcatatgtagaaagagaattgaatgaagatgattctgttatagtggcatctgatgaacgtcataattcaatgatggcacgcactattgatgcatcgtctttatgtttttctatttttactgagcgaaataaagtggtgacacaagatttatatgactctatttctagagcatattattgtctcgttgatacacaagctaatcaaaatatgattgaacactacgcaggattgaacatgaatgatattaatcttttaagggtaacgccttttgatgcgaagtcattacctaaccaaagtagtcaattgtatgacacttatattggattatggatagatggtttggacgagattgaaatacgagagattgtaaacagcttatttcaatatattcaacataaagatggctataagttgaaaattttaactaagagtagagataatcttacggaaaatcttatagatgaagttgctcatctcaatgatttatatcaccaagagaaaaaggaaataagtgatgtaattgaagacgtgatacagaataaaaaagaaacaatcattgatattgaaacagtaccgtttgaagaagatcttgtaagcgttatttcaaaattaagagttgtagtagatttatctttagagccgaaactttttttacaaatctgttgtattggcgcgggtataccacaaattaataaaaagagaacagattatgttaaacatatgcataatggatatattattgatgacatatcgcaaactgtagaatctttagattattttttggcacatttaaaaaattggaattattcttatgcatattccatgagattaacggatgattttagttcaattaatattattcatcaaattaatcagttatttaaaggtgatgtttcaagtggcacgtaa

SEQ ID NO: 7386 - DNA, 1200 bp, Staphylococcus epidermidis
atgtttaagaaattcgaatataaaatcttatataaaagaatattttttacatgcttaattttagttatatatattataggaagtaatatttcaatcgtaagtaatgaaaatttaagaactcataaagactccttttttaagttagctattactaatgtaggtggggatttacatacattaaatatattttcactaggacttgggccgtggttaagttcgatgattattttgacactaataaaccacaaaagtaatgataaggttaaaacacaaactcgtagggaacgacatttcaaagagcgagcgttaacacttatcattagtgctgctcaaggattttacattattcattcatatattaataaacatgcgattaaagatagtaatatgctcattttattattagtcttaattacaggaacgttgttaatggtgtggttagcagatcaaaatacaacgtatggcatttcgggacctatgccaattgttttaatgagtcttgttaaatctatatttaatacacattttcccaaattaaattcaagcgcatctttaattactatgattattgtcttattagtgctggccttatttatactcttcttcattgagttaacagaatatcggatagaatataatgatattatgaatatttctgctaaagatataccatcatatttatcatggaaacttaatcctgctggtagtatctctatcatggtcagtttgtcattatttatgttaacgaataatatcgttaatttcataggacgctttatcgtgaatcataattttgaaacacatgtctttaattttacaaatccagttggaattactatatatcttctgttacaaatgattttgggttactttttatcaagattattaattaatacgaaacgtaaatcaaaggaatttcttaaaaatgggaattacttcgagggtatacaacctggacagcagacagaaaaatttctagggagtaaagcacgtcgtatttgttggttcggttcaatagtagtagcgattgtacttgctataccaatgtattcagcgctgcttgtcccccacttacttaaagaagtttactttacaactcaaatgattgtatttgtctatattggaattaatatcgctgaaacaattagagcgtacttatactttgacagctataagcaaattttaaataaatattggtag

SEQ ID NO: 7387 - DNA, 6171 bp, Staphylococcus epidermidis
atgacaaagaaagaaaaggattataaaaaaagtcttgagcaacaaaaaacacgggtaaaaatatacaagtcaggaaaaagctgggtaaaagcaagtattaatgaaatagaattgttaaaaacaatggggctaccatttttaagtaaaaacgaaatacaagaaaatgtgactgaaaagacgaaaggtcataaattaaaaaaaagtgtagctaaaacaacagccctagttggtggagcatttacatttaatatgttgaataatcatcaagcatttgctgcctcagaaacaccaatcacctctgaaatttcatccaatagtgagacagtagccaatcaaaattcaactacgattaagaactcacaaaaagaaacagtcaattctacaagtttggaatctaaccattctaatagtacaaataagcaaatgtcttcagaagttacaaatacagatcaatccagtgaaaaagctggaattagtcaacaaagtagtgaaacatcaaatcaatcatctaagttaaatacatatgcctccacagaccatgtagagagtacaactactaacaatgataatactgcacaacaagatcaaaataagtcttcgaatgtaacctctaagtcaacacaatcaaacacgtcatcctcagaaaagaacattagctccaatttaacccagtcaatcgaaacaaaagcaaccgattcattagcgactagtgaagcacgtactagtacaaatcaaatatctaatctgacatcaacatctacttcgaatcaatcgagtcctacttcctttgcaaatttaagaacatttagtagatttactgttttgaatacgatggcagcaccgacaacaacgtccacgacaacaacttcaagtctgacatctaattctgttgtggtgaacaaagataactttaatgaacatatgaatctgtctggatctgcgacgtatgatcctaaaacaggtattgctaccttaacgccagacgcatatagtcaaaagggtgccatatctttaaacactcgattagattcaaaccgtagcttccgttttacaggtaaagttaaccttggtaatagatatgaaggttattctcctgatggtgtaacaggtggagatggcattggctttgcattttcaccaggccctttaggacagataggtaaagaaggggctgccgttggaataggtggtttgaataatgcctttggttttaaattggatacgtatcataacacatcaactcctaaatctgatgctaaagcaaaagcagacccacgtaatgttggtggtggtggcgcttttggtgccttcgtaagtacagatagaaatggtatggctaccactgaggcatcatctgcggctaaattaaatgtacaacctactgacaattcattccaagattttgtcattgactataatggtgatacaaaagtgatgacagtgacgtacgctggacaaacttttacgagaaatcttacagattggattaaaaacagtggtggtacgacgttttctctatctatgactgcctcaactggtggcgcaaaaaacttacaacaagttcaatttggaacattcgagtatacagaatcagctgttgctaaagtacgctatgtagatgcaaatactggtaaggatattattccacctaaaaccattgcaggtgaagttgatgcgactgtgaatatagataaacaattaaacaacttgaaaaattcaggttacagttatgttagtacagacgctttacaaaactccaattattcagaaacatcaggtacacctacacttaaattaactaactcaagccaaacggtgatttataaattcaaagatgttcaaggtcctcaaattagtgttgatagtcaaactagagaagttggaaagaccattaatccaattacaattactacaactgacaatagtaaagacgtattaactacaactgtgacaggtctaccttcagggttatcttttgatcaaacgacaaatacaattactggcacgccaagtgaagtaggaactacaactgtgacagttaatactactgatgctactgggaacgtaacatctaagcaatttacaataacgattcaagatacaatcagccctgttgtaaatgtgacgccaagtcaagcatcagaagttttcacgccgattaatccaattacgataactgctacagataatagtggcaaagtggtaacgcatacagtaactggattgccacaaggacttaaatttgatgcatctacgaattcaattgttggaactccaactcaaataggaacaaatacaatcacgattgagtcaacggatgcgagtggaaataaaactacgactaaaattaattatgaagtaacgagaaatagcgcaagtgactctacttccactagcatagtaaatagtgtttcaacaagtataagtaatagtacatcgctaagtgatagtgtaaaagagagtcaatcattatcaacaaaagaatcaacaagtaagagtctctcagggtcgttaagtgcgtcaacgtcgaatagtacgtcaatccaagcgagcgaatccgtaagtacaagtaagaagttatcagaatcagcgagtacgtcgatgtctgatagcgcatcaataaaagcgagcgaatcagcaagtacaagtaagaagttatcagaatcagcgagtacgtcgacgtctgatagcgcatcaataaaagcaagcgaatcagcaagtacaagtaagaagttatcagaatcagcgagtacgtcgatgtctgatagcgcatcaataaaagcgagcgaatcagcgagtacaagtaagaagttatcagaatcagcgagtacgtcgacgtctgatagcgcatcaacccaagcaagcgaatcagcaagtacaagtaaaaagttatcagaatcaacgagtacgtcgacttcagatagtgcatcaacatcaacgagtgagagtgactcaacaagtgaaagtacatcgttaagtgactcgacaagtgcgagtctttcagaatcgacaagtacatcaacatccgacagtgcgtccacatcaacgagtgagagtgactcaaacagtacaagtacgtcattgagtgagtcgacaagcacaagtctttcagaatcaacgagtacgtcaacatcagatagtgcgtcaacgtcagcaagtgtgagtgactccaatagcgcaagtacgtcattaagagaatcgacaagtacgagtctttcagactcaacaagtacatcgacatctgacagtgcgtcaacatcaacgagcgagagcgactccgatagcgcaagtacatcgttgagtggctcatcaagtacaagcgtttcagattcaacaagcgcgtcaacatcagaaagtgcatcaacgtcaacgagcataagtgactcaaacagtacaagtacgtcattaagtgaatcgacaagtacgagtctttcagaatcaacgagtacgtcgacatccgacagtgcatccacatcaatgagtgtaagcgactcaaatagtgccagcatatctttaagtgagtcgacaagcacaagcgtttcagattcaacaagtacatcgacatcagaaagtgcatcaacgtcaacgagcgagagtgactccaatagcgcaagtacgtcattaagtgagtcgacaagcacaagcgtttcagattcaacaagcacatcgacatcagacagtgcgtcaacatcaacgagcgtaagtgattccaatagcgcaagtacatcgttgagtggctcatcaagtacaagcgtttcagattcaacaagcacgtcgacatcagaaagtgcatccacatcaacgagtgagagtgaatcagcgagtacaagtaagaagttatcagaatcagcgagtacgtcgatgtctgatagcgcatctgcatcaacgagtgaatcaaacagtacaagtacgtcattaagtggctcgacaagtacgagtctttcaggatcaacgagtacatcgacttcagaaagtgcgtcaacatcaacgagcgtaagtgactccaatagcgcaagtacgtcattaagtgaatcgacaagtacgagtctttcagactcaacgagtacatcgacatcagatagtacgtctgcatcaacaagtgagagtgactcaaacagtacaagcacatccatgagtgaatcattaagcacaagcgtttcagattcaacaagtacgtcaacgtcagacagtgcatcaacgtcaacaagtgtgagtgactccaatagcgcaagtacgtcattaagtgattcaacaagtacaagcatttcagactcaacgagtgcgtcgacatcagatagtgcgtcagagtcagcaagcgagagtgaatcaacaagtgaaagtacatcggtaagtgaatcatcaagtacaagcgtttcagattcaacaagtacatcgacatcagaaagtgcatctgcatcaacgagtacgtcgacttcagatagtgcgtccacatcaacgagcgagagtgattcaaacagtgcaagcacatccatgagtgaatcattaagtacgagcgtttcagactcaacgagtatgtcgacatcagaaagtgcatccacatcaacgagtgagagtgagtcaaacagtgaaagtacatcattaagtgactcgacaagtacgagcgtttcagactcaacaagaacatcaacatccgatagtgcatctacatctatgagtgtaagctactcaaacagtgcaagtacgtccttaagtgactcgacaagtacaagcattttggattcaacgagtacatcgacatcagacagtgcgtcaacgtcaacaagtgtgagcgactcaaacagtgcaagcacatctttaagtgagtcgacaagcacaagcgtttcagattcaacaagcgcgtcaacgtcaacgagtgagagtgaatcaaacagtacaagtacgtcattgagtgagtcaacaagcacaagtctttcagactcaacgagtacgtcaacatccgatagtgcgtcaacgtcagcaagtgagagtgactccaatagcgcaagtacatcgttgagtggctcattaagtacaagcgtttcagattcaacgagtgcgtccacatcagacagtacatcaacatcaacgagtgagagtgactcaaacagtacaagtacgtcattgagtgagtcaacaagcacaagtctttcagactcaacgagtacgtcaacatcagacagtgcatcaacgtcaacgagtgtgagcgactccaatagcgcaagtacgtcattaagtgaatcatcaagtacaagcgtttcagattcaacaagtacgtcaacgtcagaaagtgcatcaacgtcaacgagtgtgagcgactcaaatagtacaagtacgtcattaagtgaatcgacaagtacgagtctttcaaactcaacaagcacatcgacatcagacagtgcttcaacgtcaacaagcgagagtgactcgaacagtgcaagcacatcgctaagtggatcattaagtacaagcatttcagactcaacgagtacgtcgacatcagacagtgcgtccacatcgacatcagaaagtgcatccacatcaacgagtgtgagtgagtcagacagtgaaagtacatccatgagtgtgagtgactcgaatagtacaagtacatcattgagtgactcgacaagtacgagcgtttcagactcaacaagaacatcaacatccgatagtgcatctacatcaaagagtgtaagtgagtcaaacagcgccagtacatcggtaagtggctcaacaagtacaagcatttcagattcatcaagcacgtccacatcaatgagtacatctgaaactttcacttctcaatctcctataaatagtgaaagtcaatttattggtgatagcttgtctgaagatacaatcgtgactcaatcaaaaaatacgaatatgcttaataaaactggaaaagattatgatttacaagaacaaagaggttatactgattcagaacaacacaatgaaacacaaagtaatcaagctgataatcactcaaacaacctcgatttacttcatcaaaatcgtttacaagataaagtcgttaaacaaccgactaaaggagaagatggagttgtaagcaacggttttatagtagcagtagcaatagtattggctatcttcggtttggcaaaaaaatctagaaaagacgatgatgatcaagatggtagtaaataa

SEQ ID NO: 7388 - DNA, 1302 bp, Staphylococcus epidermidis
atgaaacaatttttaaacatcactcaacgtaaatttatcgaatggttgattatcttatccatttttatagttagcattcctaataaatggacattaatgatatctatcgctttatctttattacttcttaaaagaggggcgctaggtgtcgttcaattaatcatactttatatgctcagatcgcaaatatacactccctatgatacacaagagatggcgcattacatagtaagtatgaaatatatcttgatttatgtaattggagtattttttctatttaaatatgtaaaacattggataagaaatgaaatgatattaagatttatcaagtctactatgattcttatgctactttatatcataatgagtttagtcgtatctaatgatccgatagaatctattcttaaattgcttaacttctttataccgctaattttgattgttatgtatgttagtttaataaaaaagataaagaatctcattaactggattaatcaatttatcacgctagtgattgcctttacttttttatttatagttatagcgccaaaatcatatttaattgatgaggaatcacttagaagtgttttcaaggatgcacattcattcgcagttattcttgctatgggtctagttctatatatggtaacaataatcaaacaacaagattatgatgtattcaatttattattattaaatattggaatgatagagctctatttatcaaactctcgtcatattttcatatctgttattttatgtctaatgcttctattaccgttatctcacataaaaaagagaattaaacatcccataattggtgctatgatactaatggcaattgctataataaatcaaccatatatttatcatctttttattaaactaatcttaaaagggaagaatagccaagaggtctttatgccgagtgatatgaatattaaagctattgattatgcgctaactgagcatccttttttaggaagcggttttggtataccaatgataaaagcgagttcagaaatacaatactttaatgtagcaacgagtaatatcatcttcggtatgattatctttactggaataataggacttactttatgtacgatatacatgcttcatatggtacttttagttacttttccaatgagtattactattttattatttttaatcactatctttgttaatatggattatattattttatttgattccgtggggctaggtatattgtgttatatattttggggaatatatttaaaagaaggtatgtatcaatacaacaacgaacaatggtaa

SEQ ID NO: 7389 - DNA, 816 bp, Staphylococcus epidermidis
atgaatacgttggatagtaaatatgaattaaaatcaaaaaaacatcgtcagcgaataattaaaaattgggttatagtcactgtagttgcagctgtaattatatgggcgtttgcagggattccaggtcttgaacttaaaagtaagtctattgaaatattaaagtctatcttttacggactatttcatccagatttaagttacatatatatacctgatggtgaagacttacttagaggtttgctggaaacttttgctattgcagtgattggcacgttcattgcttcaattatatgtattccttttgcatttttaggagctaaaaatatgatgaaattacgaccggttacgggcataagtaaattcatattaagcattatacgtgtgtttcctgaaattgtaatggcgttaatatttattaaagctgttggaccaggttcgttttcaggtgtacttgcactggggattcattcagtcggcatgttagggaagctttttgttgaagatattgaaagtttagattttagcgctgtagaatctttaaaggcgagtggagcaaataaaatgaagacgttaatgtttgctgtaataccacaaattttaccatcgtttatttcacttattttgtatcgatttgaattgaatttacgttcggcctccattttaggattaatcggcgcaggtggcataggtacaccattaatttttgctttacaaacacgatcttgggaccgagttggcatgattctaattggtttgattgcgatggtcgctttagttgatttaatatctggcgcggttcgtaaacgtatcgtttag

SEQ ID NO: 7390 - DNA, 801 bp, Staphylococcus epidermidis; identical to SEQ ID NO: 3723

SEQ ID NO: 7391 - DNA, 774 bp, Staphylococcus epidermidis
atgagtcaaatcgaatttaaggatgttagtaaagtgtatccaaatgggcatgtgggattaaaagatattaacttaaatatagaaaaaggtgattttgcagttattgttggattgtctggagcaggtaaatcaacattactacgatcggttaatcggctacatgatatttccaaaggtgatattactatcgaaggtcagtcaataactaaagcacgtggtaaaaaattattagaaatgcgtcgaagtataggtatgatttttcaacattttaacttagttaagcgttcaacagtgcttagaaatgttttgagtggcagggtaggataccatcctacttggaaaatgatacttggtctttttcctaaagaagataaagtcaaggcattggatgccttagaacgtgtaaatattttagataaatatgaccaacgctctgaccagttgtcaggtggtcaacaacaacgtatatcaatagctagagcgttatgtcaggaaccaaccattatattagcagacgaaccagttgcttcattagatccattaactacaaaacaagtgatggatgacttaaagaaaatcaatgaagaacttggtattactattttaattaatttacactttgttgatttggcaaaggaatacggatcgagaataattggtttaagagcgggagagctcgtttatgatggacccgcgtctgaggcaaatgacgaagtatttaatcatatatacggtcgctctattaaggacgatgaaaaattaggggtggaataa

SEQ ID NO: 7392 - DNA, 957 bp, Staphylococcus epidermidis
atgaaaaatcttaagtttttagtggtgcttgttttatcggtggttatttttgcagcagcctgtgggaattcaagttctttggataataataaaagttcggatagtggatcagattcaaaatcaggtagttatacacctaaagaattaacagtacaatttgtaccatctcaaaacgctgatacactcgaagctaaggcaaaaccgttagaaaaattgttgtcagataaattagggattccggttaaagtatcagtttcaacaaactacaacacgatagttgaagcgatgaaatctaagaaagtggatgttggtttcttgccaccaactgcatatacattagcacacgatcaaaaggcagcggatttattattaaaggcagaacgttacgacgttaatgaagatgggtctccaagtaaaaagttagttgatgattataagtcagaaatccttgttaaaaaggactctggtattaatagtctcaaagatttaaaaggtaaaaaaatagcattacaagatgtaacttctacagcaggatatacattccctctagtaacattaaaaaaagaagctggtattgatgcaacaaaagatatgaaaatagtcaatgttaaaggacacgaccaagcagttattttattgttaaatggagatgtggatgcagcagctgtatttaatgatgcacgtacagttgtgaaaaaagatcaaccaaatgtatttaaagatactaaaatattaaaactcactaaaccaattcctaatgatacgatttcagtacgtcctgatatggataaaaaattccaagataaattgaaaaaagcttttaaagaaatttctaaaactaaaaaaggtcataaaatcattagcgaggtatattctcatgaaggttatgttgatactaaagattcagactttgatatcgttagacaatatgaaaaagctgttcatgatatgaaataa

SEQ ID NO: 7393 - DNA, 1551 bp, Staphylococcus epidermidis
atgaaaatatttaaaactttaagttctatactagttacatctgttctttctgtgactgtgattccctcaacatttgcatcaacagaatctactgctacaaatcagacacaacaaacagtactttttgataattctcatgctcaaactgcgggcgctgccgattgggtgattgatggcgctttctcagattatgcagattcaatgagaaagcaaggttaccaagttaaagaactagaaggagaatcaaacatttctgatcaatctttacagcaggcgcgtgtattagttattcctgaagctaacaatccatttaaagaaaatgagcagaaagcaatcattaattttgttaaaaatggtggtagtgtcattttcatctcagaccactataatgccgatcgtaatttaaatcgtattgattcttcagaatcaatgaatggttatcgacgtggcgcatacgaaaatatgactaaagatatgaataatgaagaaaagaattctaacgttatgcataacgttaagagttctgattggctctcacaaaacttcggtgttcgctttagatataatgcacttggagatatcaatactcaaaatatcgtttcaagcaaagatagttttggtattactaaaggggtacaatcagtttcgatgcacgcaggttcaacattagcaataactgatcctaataaagctaaaggcattatttatatgccggaacatttaacacatagtcaaaaatggtctcacgcagttgatcaaggtatttacaatgggggtggcatcaacgaaggaccttatgtagccatttcaaaaatcggcaaaggtaaagctgcatttattggcgatagctccctcgtagaagatcgttcacctaaatatcttcgtgaagataatgggaaacctaaaaaaacgtacgatggttttaaagaacaagataatggaaagttattaaataatttaacaacatggctaggcaaaaaagaatctcaatcttctatgaaagacatggggattaaacttgataataaaacaccgctacttaactttgagcaacctgagaattcaattgaacctcaaaaagaaccgtggactaacccaatagaaggttacaaatggtatgatcgttcaacatttaaaacaggtagttatggaagtaatcaacggggtgctgacgatggagtagatgacaaaagctcttctcatcaaaatcaaaatgccaaagttgaattaactttacctcaaaatatccaaccgcatcatccatttcaatttacaatcaaactcacgggatatgagcctaatagcacaattagcgatgtaagagttggactttataaagatggaggtaagcaaatcggtagcttttcttctaaccgtaaccaattcaatactctcggctatagtcctggccaatcaattaaagcaaatggtgcgggtgaagcttcattcacactcacagctaaagtgacagatgaaattaaagatgctaatattcgtgttaaacaagggaaaaaaattctattaactcaaaaaatgaatgaaaatttttaa

SEQ ID NO: 7394 - DNA, 1536 bp, Staphylococcus epidermidis
atgtctcaaattgcgttctatatccttagtgatgttcacggttttatattcccaacagatttttcatcaagagaaaaagatttacctatgggtttgttaaaagctaatcatctaatcgaacaagactgcgtgcactatgacggcagtgtaaagatcgataatggggacttcttacaaggttctccattatgtaactacttagtatctaaattaaagagtagtctcccattaacatcaatatataatcgtttagggtttgattttggaattgttggcaatcatgaatttaattatgatttaccttatctaaaacaggccatcaatcaacttcattacccagttttgtgtgcaaatataattgaaaatacacagccattcactggccaaggtattcattattttaaagtaaatgatttaactataggaactattggattaaccactcagtatattcctcactgggaacaacctgattacattaagacactcacttttaacagtgctgtccacatattaaaatctgagttacctacacttagggaaaagagtgatattgtagtagtaagttatcatggtggttttgaacgtgatttagatagtggcctcccgactgaggcgcttactggggaaaacgaagggtatgatatactaagtcagtttagcgatagtatcgatgtgttgataaccggccatcaacatcgtgatattgcgacaatcaagaaccaaacagccatcattcaaccaggttcaaaaggtacaaaagttggaaaaatagttattgaatatacacatgataaaaaagtattaattaaagaatgtaacttaatgaatgttaataacaatacctcctttaagccgaatgtcgaagatatcgctttacgtaatcaattggaagattggcttgatactcaaatcgcagaactcccctacgctatgagaataaacaattcatttgaggcaagaaaatcaccgcatgcatttgttaaccttcttaattatattttattagaaaaaagtggtgcagatattgcatgtacagcactatttgattccgcaaatggctttgatgagaaaataaccatgcgtgatatcatcaataattatccttttcctaatacttttaaagtgattgaacttagtggaaaagatattaaacttgcaattgaacgaagcgcaagttattttgacattgttaatcataaaatcacagttaataaagagtttctagaacctaaacctcagcatttcaactatgacatatttgcaggtatccaatatacaattcatgttagtcatccttacggtgaacgtgttagtgatttactaattaatgatgcaccaatacaaagtgatcaaatatatacaatatgcgtaaataattatagagctgttggtggcgggaattatgatatgtacgttaacaaacctgtgataaaagatattcaaatcgaaggtgctcaattgttaatagattacttatctcacaatgatttatcacaaatcccacaagtgattgatttcaatgttgttaagtaa

SEQ ID NO: 7395 - DNA, 1176 bp, Staphylococcus epidermidis
atgaaagataataaaatgttgttcattatttttatgataggaacatttacagtaggaatggctgaatatgtagtgacaggattacttacacaaatcgctgacgatatgaaggtttctatttcgagtgcaggtttattaattagtgtttatgctattagtgttgcattgatagggcctttaatgcgaatcataacattgaaagttcacgcccaccgtctgttaccgattttagttgcgatttttataataagtaatttagtgggaatgttagcaccgaattttaatgtattgttattatcaagactcatgtctgcggcaatgcatgcgccattcttcggtgtgtgtatgagtgttgctgcgacagtcgcacctcctgctaaaaaaacacaggccattgcacttgttcaggcaggtttaactattgctgtaatgttaggtgtaccattcggatcatttttaggtggctttgcaaattggagagttgtttttggattcatgattgtgttggcaatcattactatgttaggaatgattaaatttgttccaaatgtttctttaagtgcagaagcaaatattagcaaagaattaacagtgtttaagaatccacacattttaattgtgattgcaattattgtgtttggttactctggtgtgtttactacttatacatttatggagccaatgatacgagatttttctccatttaaaattgtaggtttaactgtttgtttatttatgtttggtctaggcggtgtgatagggaatttaattactggtaatgtaccggaagataaattaacaaaaaatttataccttacatttcttttactatttgtaacaatcatactatttgttactgttattcaaaattcaatattagcattaatcatttgcttcttattcggttttggtacatttggtacaacaccgttacttaatagcaaaattatcttaagtgcaaaagaagcaccacttcttgcaagtacgttagctgcttctattttcaatgttgctaattttcttggtgcaatcattggatctatattattatcaatagggttaccttacattcaaattactttgatatctggtgggattatagtgttgggtatgcttcttaatcttgttaatcaactttatgaaaagaaacatatcacatttaatgaatattcatga

SEQ ID NO: 7396 - DNA, 660 bp, Staphylococcus epidermidis; identical to SEQ ID NO: 5290

SEQ ID NO: 7397 - DNA, 1017 bp, Staphylococcus epidermidis
atgatttacgcttatatcggtataacagtattatgggtatttttattttgttatattattatcgcctccattgattttggtgcaggatttttcgcattgcattctaaaatgacaggtaatgagaaaaaggttaatcatttaatccatagatacctcaatccagtttgggaagttacaaatgtctttttcgttttcttttttgtaggatttataggtttttttcctgattctgctaaatacttaggaacagttttattagtacccggatcaatagctttaattcttatttctatacgaagtagtttttatgcttttgaaaattatggtcaagatactaaactgccctggattgtattatatggtttaacagggctgttaattccagcttctctagcaactgctctaacaatttcagaaggtggttatatctatgagcatggcacacatattgatttagactggatacaattattattaagtccatttgcatggtctgtagtattcttagccattgtttcagttctttatatttcatcaggttttttaacatattatgctcataaagcaaatgatcaacctgcttatgatatgacacgacaatggcatattttttgggggccacctatgattgtgatttcattatttgttttcttatctcttagaattcaaaattctgatcactttagaactgctatttttaattattggtggatgtttgcaatcagctttatattttttataatagctggattactgactatatttaaaaagaaacacggtctagcttttatcatggttatattgcaaatgttatttgcattctttggctacggaatgagtaaacttccatatttactttatccgtttattaaaattacagactcccatgtcaatccggaaatgggattatcattagttattgtttttgttttaggtttacttttattaattccatcgttaatattattattaagattatttgttttcgacaaagcatatgtggaaggaaagaaataa

SEQ ID NO: 7398 - DNA, 1356 bp, Staphylococcus epidermidis; identical to SEQ ID NO: 4198

SEQ ID NO: 7399 - DNA, 237 bp, Staphylococcus epidermidis; identical to SEQ ID NO: 4199

SEQ ID NO: 7400 - DNA, 1719 bp, Staphylococcus epidermidis
atgtctaaattaattaaagggattgctgcatcagatggtgtggcaatcgcaaaagcttacttaattgtagagccagacttatcctatgacagtaacgaaaaagttactgacatagaaagtgaagttgaaaagtttaatgacgctatcgaagcttcaaaaatcgaattaactaaaataagaaataatgccgaagctcaattaggtgctgataaagcagcgatttttgatgcacatttacttgttttagatgatccagaattaatacaacccattcaagacaaaattagaaatgacaaagtcaatgctgcaactggtttggatgaagtaacgacacaatttatttctatttttgagtcaatggataatgaatacatgaaagaacgtgcagctgatatcagagatgtttctaaacgtgtattggctcatattctaggtgtagatttacctaatcctagtttaatcaatgaaagtgctgtcattgtaggtaatgacctcacaccttcagatacagcacagttaaataaagaatttgttcaaggttttgtaactaatatcggtggtagaacaagccactctgcaattatgagtcgttcattagagattgcagctgttgtcggtactaaatctatcactgaagaagttaaacaaggtgatatgattattgtagatggtatgtccggagatgttatcatagatcctacagaagatgagttaattgcttatcaaaataaacgtgagcgtttctttgaagataagaaagaacttcaaaaattgcgcgatgctgatacagtaacagttgacggtgttcatgctgaactagctgctaatattggtactccagatgacttatcaggagttattgataacggtgcacaagggataggtttataccgtacagaattcttgtacatgggtagagatcaaatgcctactgaggaagaacaattcgaggcttataaaaaggtacttgaaactatggacggtaaacgtgtagttgtacgtactttagatattggcggagataaggagcttccatacttagatttgcctaaagaaatgaatccattcttaggttatcgtgcgatacgtttatgtttagcacagccggaaatctttagaccacaattacgtgcattactacgtgcttcagtctatgggaaattgaatattatgttcccaatggtagcaacaattaaagaattccgtgacgctaaatcaatgcttcttgaagagaaagaaaatcttcttcgcgaaggttacgaagtttcagatgatattgaattaggtattatggttgaaattccagctaccgcggcacttgctgatgtatttgctaaagaagtagatttctttagtataggaacgaatgacttaattcaatacacattagctgctgaccgtatgtctgaacgagtttcatacttatatcaaccatataatccttcaattttacgattagttaaactagttattgaagcttctcataaagaaggtaaatggactggtatgtgtggtgaaatggctggagatcaaacagctgtgcctttattattaggtttaggtttagatgagttctcaatgagtgcgacttctatcctaaaagctagaagacaaatcaatggtttaagtaaaaatgaaatggctgaactcgctaatagagctgttgaatgctcaacgcaagaggaagtcgttgatttagttaaccaattagctaaataa

SEQ ID NO: 7401 - DNA, 267 bp, Staphylococcus epidermidis; identical to SEQ ID NO: 4201

SEQ ID NO: 7402 - DNA, 540 bp, Staphylococcus epidermidis; identical to SEQ ID NO: 4202

SEQ ID NO: 7403 - DNA, 1173 bp, Staphylococcus epidermidis; identical to SEQ ID NO: 4203

SEQ ID NO: 7404 - DNA, 1293 bp, Staphylococcus epidermidis; identical to SEQ ID NO: 5298

SEQ ID NO: 7405 - DNA, 135 bp, Staphylococcus epidermidis; identical to SEQ ID NO: 4205

SEQ ID NO: 7406 - DNA, 1776 bp, Staphylococcus epidermidis
atgtattatacaaatagtaattatgaagcgtttgctcggcctaaaaaacctgaaaatgttgataataaatcagcctatttgataggggctggattagcttctttagctgcagcatgttttttaattagagatggacaaatgaaaggcgagaatatccatattttagaagagttagatatctcaggaggaagtttagatggcatcaatatggagcatcatggctatgtagtacgtggtggcagagaaatggaaaatcattttgaatgcttatgggatttattcagaagtataccatcacttgagcaaactaatgcttctgtgttagacgagttttattggttaaataaagaagaccctaattattctaaatgtagagcgattgaaagtggaggtaagcgtattgatactgatggtgattttacattaacaaaaaaagcaattaaagaaattttaaatttatgtttgatgaaagaagaagatttagacgatgttaaaatcactgatgtcttttcaagagactttttaaattctaatttttggctttattggaaaacaatgtttgcattcgagccatggcattcagcgatggagatgcgtagatatcttatgcgttttgtgcatcatattggtggtttagcagattttagtgcattaaaatttactaagtataatcaatatgaatctttagtattaccgatgatagaatatctaaaatcacatagcgtgaactttgaatttggagtacaagtgaataatattttagttgatgcaacaccatctactaaaattgctagagaaatcattttaactagagatgataaagaagaatctatcccgttgacagttaatgacttggtatttgttactaatggaagtattaccgaaagttcaacctatggtgataatgaccatcctgctcctataacacattctttaggtggtagttggacattatggaaaaacttagctaatcaaagtcctgaattcggaagacctgagaaattctgtgatcacattccagctaaaagttggttcgtatcagcaacggcaacaacagataataaaaaaataatctcatatatcgaacaattatgtaaaagagatgttttatcaggtcggacagtcacaggcggtatcatttctgtcgctaattcgagttggcaacttagttttacagtgaaccgtcagcaacaatttaagaaacaacctaaaaatcaagttagtgtatggatttacgcattatactctgacgaaaaaggagacttcattaaaaaaccaatcacggaatgtactggtagtgaaatctgtcaagaatggttatatcatatgggtgttccacaagaggaaattgttgaattagctcaatcagaatgtaacacgattcctgtttatatgccatatgtaactgcatatttcatgcctagagcatacaaagatcgaccgttagtagtaccgaatggctctaaaaatttagcatttattggaaactttgcagaaacagcacgggatactgtattcactacagaatattcagttagaacagctatggaagctgtttatcaattattggatgttgatagaggtgtacctgaagtttatgcctctgaatttgatgcacgcgtactgatggatgcattttatgaattaaatgatcgtaaatctttacatgaacttgttaataaaaactttattaaaagatcagtattaaatacagtgctgaagaaaatacgtggtactttcattgaagaattgttacgtaaacataaattactatag

SEQ ID NO: 7407 - DNA, 576 bp, Staphylococcus epidermidis; identical to SEQ ID NO: 4207

SEQ ID NO: 7408 - DNA, 1404 bp, Staphylococcus epidermidis
ttgttacgtgttaaaaatttacgtttaaagtatccgaatggtgataggaaaatattcaataacttaaatcttgagattaaaaataaagaaaaagtgcttttactcggtccttccggatcaggtaaaagcacattacttaatgtattaagtggaatagtacctaatttaattgaacttccgatgaaatatgatgaattgaatattgatcatgatagtggcgttatatttcaagatccagataatcaattttgtatgccaaaagtatatgaagaacttgcatttgttttagaaaatagaaatattcctagaagtgagatggatcaagaaatcgaagacgcactaaagtctgtagaccttaatgttactcataaaacatatgtcaataatctaagtggtggcatgaaacagaagttagctattgttgaaacaatactacaaaaatcaaagacactttttttagatgagcctactgcaatgctcgacgtgaaagcaactgaagatttatggaagaaattaatcaatctttgggaagatcaaacagttttaattgttgagcataaggttgaacatatttggcaacatgttgaccgcgtattgttattaaattatgatggtgaaattgttgctgacgacaccccagaacaaatcttggatcattatgaagcgttattaactgaatatggagtttggcaccctagagcatggcacagtgcaccacgccccatcccattacctaatcaaacaaagaacctcttatttcattttgacgacgggcaaattattagaggtaaaaagacacttttttcatccaaggagcttaaactgtattcaggtgaatggttaacaatcactggtaaaaatggtgctggtaaaacctctttactagaagctatgttacaactgattaaatatgaaggtgacatgttttatcgcgatcaattattatctaaaattaaacaagcggcaaagcatatgtatttggtatatcagaaccctgaattacaatttattactaattctgtttatgatgaagtgtatattcattataatcacttagatcctaagcatgcgaatgatgaaaccatggatctgttaaaattattacatttagatcaagttaaggatcatcatccttttgaaatatcaacaggtcaaaagcgtcgtttaagtgttgcaacagcattaagttcaaaggcagagattattttactagatgaaccaacattcggcctagatagtcataatacatttcaacttattaagttatttcaagaacgcgttaatcaaggtcaaacaattatcatggtgacacatgatccagaaattattaaacgatatccaacaagacgattacgcgtggaagatggatgtcttaaagaaatggaaggtgaacacattgtttga

SEQ ID NO: 7409 - DNA, 807 bp, Staphylococcus epidermidis; identical to SEQ ID NO: 5303

SEQ ID NO: 7410 - DNA, 1242 bp, Staphylococcus epidermidis
ttgaaagttttaatagttggagctggtggacgtgaacatgcattagcttctaaaatcaatcaatctccaattgtagataaggtttacgcgattccaggaaatgatgcaatggtcaatattgctgaagtgcacagtgaaattgctgaatcagatcatcaagctattttacattttgctcagcataacgcaattgattgggtaatcattgggcctgaacaacctttaatagatgggttagctgatttattaagaaatgcaaatattaaagtgtttggtccaggacaagatgccgctcaaattgaaggttcaaaattatttgccaagcaattaatggacaaatatcgtattcctacagcagaatataaagaagtaagttcacgtaacgaggcgttgcaatatgttgaaacttgtgatttaccaatcgtaataaagaaagacggtttagcagcaggtaaaggggttattattgcttttacgagagaagacgcattagaaggggtcaaaaaaatttatcaagaagaaaaagggaaagtcgttttcgaaagttatttagaaggagaagagttttctttaatgacttttgtaaatggagattatgcggttcctttcgactgtattgctcaagatcataagcgagcatttgataatgatcaaggaccaaatactggtgggatgggcgcatattgccctgtaccccacattgatgcatctgttcttgaacaaaccaataaggagattgctcaacctattgctaaagctatggcacaagaaggtcatgacttcttcggattactatatattggtgcaattttaacaaaagatggacctaaagttattgaatttaatgcacgttttggtgatcctgaagcacaagtattattaacacgtttagaaagtgacttaatgcaactcattatcgatttggaaaattgccaacccattcattttaactggaaagatgaagctgttgtaggagtaatgctagcatctaaaggataccctggttcatatgaaaaagggcatgaaataagtggttttaatctagattctcattattatgtgagtggattaaagaaagaaggtcaatgttttgtgaattctggtggaagagttatcctagctataggggaaggtccaacagttgaaaaagcacaagcaaatgcatatgaacatgcacgacaaataaaaagtgataatcttttttatcgtaatgatattgggaataaagccatcactaagtaa

SEQ ID NO: 7411 - DNA, 1479 bp, Staphylococcus epidermidis
atgaaaaaagcaatattaagcgtttctaataaaagtggaattgtagagtttgcaaaagcattaactaatttagactatgaactgtattctacgggtggtacaaaacgtgtattagaagatgcgaatatcaatattaagtccgtgtcagaattaacacaatttccagagattatggatggtcgtgttaaaacactacatccagcagtccatggtggtattttagctgatcgagataaagaacatcatttagagcaattacgagaacaacatattgatttaattgatatggtagtagtcaacctatatcctttccaacagactgttgctcaacctgatgtaacagaaactgatgcaatagaaaatattgatattggtggacctacaatgttaagagcagctgctaaaaactttaaacatgttacaactatcgtacatccttccgattacaacgaggtaattgagagaattaaaaatcatcaattggacgaagcatatagaaaatcgctaatggttaaagttttccaacatacaaatgaatatgatcatgctattgttaactatttcaaagacaataaagaaacactaagatatggcgaaaatcctcaacaatctgcatattttgttagaacatctgatagcaaacatacgattgctggtgcaaaacaattacatggtaaacaattgagttttaataatattaaagacgcagatgcagcgctcagtttagtaaaaaaattcaacgagccaactgctgtagcagtaaaacatatgaacccgtgtggagtaggaattggacagtcgattgatgaagcatttcaacatgcatatgaagcggataatcaatcaatatttggcgggattatagcattgaatagaacggtagatgttaaattagctgaagcattacattctatctttttagaagtagttatcgcacctcaatttactgaggaagctttaaaaatattgacacaaaagaaaaatattcgtttattacaaatagatatgacaattgataacgctgaacaagaatttgtttccgtttcaggtggttacttagtacaagataaagataataaagatgtgactcgaaatgacatgactgttgctaccgacattcaacctacagaagcacagtgggaagctatgctcctaggttggaaagttgtaagtgccgttaagagtaatgcagtgatattgagtaacaacaaacaaacagttggtataggtgcagggcaaatgaatcgtgtaggttccgctaaaattgcaatcgaaagagcaatagaaattaacgataatgttgcgcttgtttcagatggtttcttcccaatgggagatacagttgaatatgctgccgaacatggtattaaggcaattattcaaccaggtggttcaattaaagatcaagattccattgatatggctaataaatatggcattacaatggttatgacaggtatgcgtcattttaaacattaa

SEQ ID NO: 7412 - DNA, 567 bp, Staphylococcus epidermidis; identical to SEQ ID NO: 5306

SEQ ID NO: 7413 - DNA, 1032 bp, Staphylococcus epidermidis; identical to SEQ ID NO: 4213

SEQ ID NO: 7414 - DNA, 1485 bp, Staphylococcus epidermidis
atgtctaactactcaggattaaatgaagaatgtggcgttttcggtatttggaatcatcctgaagcagcacagttaacatatatgggtctacatagtttacaacacagaggtcaagaaggtgcaggtattgtagtttcaaatcacgaaacgctaaaaggtgaacgaggattaggcctattaactgaagcaattaaagacgaacatatgtcaaatataaaaggttatccacatgcgataggacatgttcgttacgcaacctctggtaataaaggcattgaaaatattcaaccatttttatatcacttttatgatatgagcgtaggtatatgtcataacggtaatttaattaacgctaaatcattacgtcaaaatttagaagaacaaggtgcgattttccattcttcttcggatactgaagtcattatgcacttaattcgtcgtagtaaggcgccgacatttgaagaggcattgaaagagagtttacgactcattaagggtggatttacttttgccatcctaacaaaagatgcgttgtatggtgcagtagatcctaatgctattcgaccattagtagttggaaaaatggagaacggtgcttatattttagcaagtgaaacatgtgcgattgatgttttaggtgctgaatttatacaagatattcatgcaggtgagtatgttgttattacggatgaaggtatagaagttaagacttacacacgacaaacaacaactgcaatttcagctatggaatatatttattttgcgagacctgattcaacgattgcaggaaaaaatgttcatgcggtacgaaaggcatcaggtaaacggttagcacaggaaaacccagcaaaagcagatatggtaataggcgtacctaattcatcattatctgcagcaagtggttatgctgaagaaataggcctaccatatgaaatgggactagttaaaaatcaatatgttgctcgaacttttatacaacctactcaggaattaagagagcaaggtgtacgtgtgaaactgtcggctgttaaggatattgttgatggtaaagatatcgtacttgtagatgattcgattgttcgaggtacaacgattaaacgcatagttaaaatgcttaaggattcaggagctaaccgcattcacgtaagaattgcttctcccgaattcatgttccctagtttttatggtattgacgtatctacaacagctgaactcatctcagcaagtaagtctcctgaggaaattaaaaatcatattggtgcagattctcttgcttatttaagcgttgatggcttaatcgagtctataggacttgattatgatgcgccatatcatggcttgtgtgtagaaagttttacaggtgattatccagcaggactttacgattatgagaaaaattataaaaagcatttaagtgaacgtcaaaaatcatatatagctaataataaacattattttgatagtgagggaaatttacatgtctaa

SEQ ID NO: 7415 - DNA, 2190 bp, Staphylococcus epidermidis
atgtctaaatttatcgaaccaagtaatgaagagattaaacttgaaaaactttatcaagatataggattaagtgataaagaatatgacaaagtggttgaaattcttggtagagaacccaacttcacagaagtaggaattttctcagtgatgtggagcgaacattgctcatataaacattctaaaccatttttaaaacaatttcctacgacaggagagcacgtattaatgggaccaggagaaggtgcaggtgttgtagatataggcgataatcaagccgtagtatttaaagttgagtctcacaatcatccatctgcaattgaaccatatcaaggtgcggcaactggagtcggaggtattattagagatattgtttcaattggtgcccgtccaattaatttactaaatagtcttcgttttggtgagttaactgtaaaacaaaatcaacgattacttaaaggtgttgtaagtggtattggtggatatggcaactgtattggtattcctactacggctggtgagattgaatttgatgaacgctatgatggcaatccattagtcaatgctatgtgtgtaggaatcattgatcatgatatggtccaaaaaggaacagctaagggtgttggtaattccgttatatatgtaggtttaaaaactgggcgtgacggtattcatggtgcaacatttgcatctgaagaacttactgaggaaagtgaaagtaaaagaccttcagtacaaattggagatccatttgtaggcaaaaagctaatggaagcaacattagaagcaattacttttgatgaactagtaggtatacaagatatgggagcagctggtttaacttcatcttcatctgaaatggcagctaaaggtggtagtggtttacatttaagacttgatcaagttccaacaagagaacctggaatttccccatatgaaatgatgctttcagaaacgcaagaaagaatgctgttagttgtagaaaaaggtacagaacaaaagtttttagatttattcaataaacacgaactagatagtgcagtaatcggtgaagtaacagacactgatagattcgtgcttacatacgatgatgaagtgtatgcagacattcctgtgcaacctcttgctgatgaggcaccagtgtatattttagaaggagaagaaaaggaatataatacatcaaaaaacgattacagcaatatagatgtacatgatacatttatcaagttattacaacacccaacaatagcatctaaacatcatttatatgaacaatacgatcaacaagtaggagcaaatacaattattaagccaggtttacaagcttcagttgtgcgcgtagaaggaacacaaaaagctattgcttcaactatagatggtgaagcacgttatgttttcaaccaaccttatgaaggtggaaaaatggttgttgctgaagcctatcgaaatttaattgcagtaggggcgacaccattggctatgactgattgtctaaactatggttctccagagaagaaagaaatctatcaacaattaatagattcaacaaaaggtatgtcagaagcttgtaaagtgcttcaaactcctgtagtttcaggaaatgtttcattatataacgagacacgtggaacctctatcttccctacacctgtcgtaggtatggttggtcttattgaagacgtgagctatctaaaagagtttaaacctaaagcaggagataagatttatttagttggtgaaacgcgtgatgactttggtggtagtcaattggaaaaattgttgtatggatcagttaatcatgagtttgaatctattgatttaagtgatgaagtttcaaaaggaaaattaatcaaacaggctattcgtaatggcattgcatctcatgtacaaacagttggtaagggcggcttattagttactttagctaaaattagtgcccattatgatttaggtatgcaagctcaattggatgttaccaatgcacaattatttagtgaaactcaaggacgatatattgttgttgttaaagaagggcaaactttggatatagatcaagctcaagaaattgggcatttaactcatcagcagttatttgatatatctaattcagacgtaaaaataaaagaaaacgtttcagatatcaaacaaaaatgggaaggggctatagttcaatgtctaactactcaggattaa

SEQ ID NO: 7416 - DNA, 672 bp, Staphylococcus epidermidis; identical to SEQ ID NO: 4216

SEQ ID NO: 7417 - DNA, 261 bp, Staphylococcus epidermidis; identical to SEQ ID NO: 4217

SEQ ID NO: 7418 - DNA, 705 bp, Staphylococcus epidermidis; identical to SEQ ID NO: 4218

SEQ ID NO: 7419 - DNA, 1128 bp, Staphylococcus epidermidis
atgaacttcagtaaacttaaatttggcgcgacaataggaatcattggcggagggcagttaggaaaaatgatggctcagtctgcacaaaaaatgggttataaggtgattgtcctagatcctaatgaagactgtccttgtcgttatgtcgcacatcagtttattcatgcaaattatgatgatgagcaagctttaaatcagttaggtgaaaattctgatgttgttacttatgagtttgaaaatatttcgtctgaacaattaaaaaaactcactcagttatatcatattccccaagggtaccaagctattgaactattacaagataggctaaccgagaagcaaacattactagaagcaaatactcaaattgttccttttgtacaaattcaaacaaatcaagacttattaaaagccatagaaaaattaggctttccgttcatagtgaaaacacgttttggtggatatgatggtaaaggacaaattttggtaagaaatgattcggaattagacgaagcataccagctagttgagaagcaagaatgtgttgctgaacaatatcttgatattcaaaaggaagtatctcttacagtaacaattggaaatgaacaacaaacaacatactttcctcttcaagaaaatgaacatcaaaatcaaatattatttaaaacagtcgttccagcaagatctgataaagaaaatgaagcacgtaaggaagttgagaaaatcactcgcgcaattcattttgtgggaacctttacagtagaattctttattgataaagaaaataacttatatgtaaatgaaattgcaccaagaccacataattctggacactattctatagaagcttgtgattattcacagtttgatacacatattttagccataactggtcaaaaacttccgcaagctattgaattattaaagccaacagtaatgatgaatttattaggtcgcgatttggatttacttgaaaatgaatttagcagacatccagattggcatattcacatttacggtaagaaagaaagaaaacctgatagaaaaatgggacacatgactttactgacggatgatgtcaatcaaacagaacaatatatgttaatgaaatttgaagggagagacaagtaa

SEQ ID NO: 7420 - DNA, 483 bp, Staphylococcus epidermidis; identical to SEQ ID NO: 5314

SEQ ID NO: 7421 - DNA, 861 bp, Staphylococcus epidermidis
gtggttgctaaaattttagatggtaaacaaatagcaaaagaatatagacaaagacttaaaaatcaagtcaatgacttaaaagaatatggttttactccaaaattatcagtcatattagttggtaatgatggtgcaagccaaagttatgtaaaatcaaagaaaaaagcagcagaaaaaattggaatgatatcagaaattattcacttagacgaatccacatcagaagaagtagttttaagcgaacttaatcgattaaacaatgacgatactgttagtggtattttagttcaagtaccattacctaaacaggtaagcgaacaaaaagtacttgaagctatcaatccggaaaaagatgtagatggtttccatccaattaatattggaaaattgtatattgatgagcaaacctttgtaccatgtacacccctgggtattatggaaattttaaaacacgcagatattaatttagaaggaaaaaatgcagttgttattggtcgtagtcatattgttggccaacctgtttcaaagttattgttgcaagctaacgcaactgttacgattttacattcacgtacaaaaaatatgaatgcacacttaaaacaagcagatgtgattgttagcgcagtaggacaacctggtttagttactaaagaaaatgtcaaaaaaggcgcagtaattatagatgttggtaatacacctgatgaaaatggaaaattaaaaggagatgtagcatatgatgaagtaaaagaaatagctagtgcaattactccagtaccaggtggtgttggtcctttaactattacaatggtacttaataatacacttcttgcagagaaattaagacgtggcttaacaaaataa

SEQ ID NO: 7422 - DNA, 318 bp, Staphylococcus epidermidis; identical to SEQ ID NO: 4222

SEQ ID NO: 7423 - DNA, 1125 bp, Staphylococcus epidermidis; identical to SEQ ID NO: 4223

SEQ ID NO: 7424 - DNA, 1989 bp, Staphylococcus epidermidis; identical to SEQ ID NO: 4224

SEQ ID NO: 7425 - DNA, 606 bp, Staphylococcus epidermidis; identical to SEQ ID NO: 4225

SEQ ID NO: 7426 - DNA, 291 bp, Staphylococcus epidermidis; identical to SEQ ID NO: 4226

SEQ ID NO: 7427 - DNA, 930 bp, Staphylococcus epidermidis; identical to SEQ ID NO: 5151

SEQ ID NO: 7428 - DNA, 1203 bp, Staphylococcus epidermidis; identical to SEQ ID NO: 4228

SEQ ID NO: 7429 - DNA, 1239 bp, Staphylococcus epidermidis; identical to SEQ ID NO: 4229

SEQ ID NO: 7430 - DNA, 471 bp, Staphylococcus epidermidis; identical to SEQ ID NO: 4230

SEQ ID NO: 7431 - DNA, 132 bp, Staphylococcus epidermidis; identical to SEQ ID NO: 4231

SEQ ID NO: 7432 - DNA, 423 bp, Staphylococcus epidermidis; identical to SEQ ID NO: 4232

SEQ ID NO: 7433 - DNA, 4008 bp, Staphylococcus epidermidis
atggcgaaaaaattcaattacaaattaccgtctatggttgctttaacgttatttggcacagcttttactgcacatcaagcaaatgctgctgaacaaccacagaatcagtctaatcataaaaatgtattagatgatcaaactgccctcaaacaagcagaaaaagctaaaagcgaagttacacaatcaactacaaatgtatctggtacacaaacatatcaagaccctacccaagttcaacctaaacaagacacacaaagtactacatatgatgcatcattagatgaaatgagtacttataatgaaatttcatcaaatcaaaagcaacaatctttatcaacagatgatgcgaatcaaaatcaaacgaattctgttacaaaaaatcaacaagaagaaacaaatgatttgacacaagaagataaaacatccactgatacaaatcaattacaggagacacaatctgtagcaaaagaaaatgagaaagatttaggagctaacgcaaataatgaacaacaagacaagaagatgactgcaagtcaaccttccgaaaatcaagcaattgaaactcaaactgcttctaatgataatgaaagccaacaaaaaagtcagcaagtaacttctgaacaaaatgaaactgctacacctaaagtatcaaatacaaacgcatctggttataattttgattacgatgatgaagacgatgatagctcaacagaccatttagagcctatctcattaaacaatgtgaatgctacatctaaacaaactacttcatataaatataaagaaccagctcaacgtgtaacaactaatactgtaaaaaaagaaacggcatctaatcaagcgactatagatacaaagcaattcaccccatttagtgcaactgctcaaccgagaacagtttattctgtatctagtcaaaaaacatcatcattaccgaaatatacaccaaaggttaattcttcaataaataactatattcgtaaaaagaatatgaaagcaccaagaattgaagaagattatacgtcatatttccctaaatatggctatagaaacggtgtgggacgtcctgaaggtatcgttgttcatgatactgcaaatgataactcaacaatcgatggcgagattgctttcatgaaacgtaattacacaaatgcattcgtacacgcatttgttgatggcaatagaattatagaaacagctccgacagattacttatcttggggtgcaggtccatatggaaatcaacgttttatcaatgttgaaatcgtccatacacatgattatgattcatttgcacgttcaatgaacaactacgctgattatgctgcaacgcaattgcaatattataatttaaaacctgatagcgctgaaaacgatggaagaggaacagtttggacacatgctgctatctctaacttcttaggaggtactgatcacgctgaccctcaccaatatttaagaagtcacaattatagctatgcagaattatatgacttaatttatgaaaaatatttaattaaaacgaagcaagtagcaccttggggcacaacatctacaaaaccgtcacaaccttctaaaccatcaggaggaactaataataagttaactgtgtctgctaatcgtggtgttgctcaaattaaaccaacaaataatggcttatatacaactgtttatgacagtaaaggtcataagactgatcaagtacaaaaaactctatccgttactaaaactgcaacattaggaaataacaaattctatttagttgaagactacaatagcggtaaaaaatacggttgggttaaacaaggtgatgttgtttataacactgctaaggcaccagtaaaagtgaatcaaacatataatgttaaagcagggtcaacactttacacagttccttggggtacaccaaaacaagttgctagcaaagtatctggtactggaaatcaaacatttaaagcaactaaacagcaacaaattgataaagcaacgtatctttatggtacagtgaatggtaaatctggttggattagtaaatattacttaactacagcatctaaacctagcaatccaactaaaccttcaacaaacaaccaattaacagtgactaacaatagtggtgttgctcaaatcaatgcaaaaaatagtggcttatatactacagtttatgacactaaaggaaagacaacaaatcaaatccaacgtacattgtcagtgacgaaagctgccacacttggtgataaaaaattctatcttgttggtgattataatactggtacaaattatggttgggtaaaacaagatgaggtcatttacaacacagctaaatcacctgtaaaaatcaatcaaacatacaacgtcaaacctggtgttaaattacacacagtaccttggggcacatataatcaagtggctggaacagtttcaggtaaaggcgatcaaacttttaaagcaactaaacaacaacaaattgataaagcaacatatctttatggtacagtgaacggtaaatctggttggattagtaaatactatttaactgcaccatcaaaagttcaagctttgtctactcaatcaacaccagcacctaaacaagtaaaaccatctacacaaactgtaaatcaaattgctcaagtgaaagctaataattctggaataagagcatctgtatatgataaaacagccaaaagtggtacgaaatacgctaaccgtacattccttatcaataaacaacgtactcaaggtaataacacgtatgtactacttcaagatggaacaagtaatactccattaggatgggtaaacattaatgatgtgacaactcaaaatatcggaaaacaaactcagtctataggtaaatattcagtaaaacctacaaataatggtctatattctattgcttggggtactaaaaaccaacaattactagcacctaatacgctagctaatcaagcatttaatgcttccaaagctgtttacgttggtaaagatttatatctatacggtacagtcaataacagaacaggatggattgctgctaaggatttaatccaaaacagtactgacgctcaatcaacaccatataactatacttttgttatcaataatagtaaaagttatttctatatggatccaacaaaagcaaaccgatattctttaaaaccatattatgaacaaactttcacagtcattaagcaaaaaaatattaatggcgttaaatggtactatggtcaacttttagacggtaaatatgtttggataaaatcaactgacttagttaaggaaaaaattaaatatgcatatactggaatgactttaaataacgcgataaatatccaatctcgtcttaaatataaaccacaagtacaaaatgagcctttgaaatggtcaaatgctaattatagtcaaattaaaaatgctatggatacaaagcgtttagctaatgattcatccttaaaatatcaattcttacgtttagatcaaccacaatacttgtcagcacaagctctcaataaattattaaaaggcaaaggtgtacttgaaaaccaaggcgctgcatttagccaagctgcacgtaagtatggtctaaatgaaatttatcttatctcacatgctttagtagaaacaggtaatggaacttcacaacttgctaaaggtggagatgtttcaaaaggtaaattcacaactaaaacaggtcacaaataccataatgtctttggaattggtgcatttgacaataatgcacttgtagatggtatcaaatacgctaaaaatgctggatggacttctgtctctaaagcaattattggtggcgctaaattcattggaaattcatacgtgaaagcaggacaaaatacgctatataaaatgcgttggaatcctgcaaaccctggtacgcatcaatatgcaactgatattaattgggcaaatgtcaacgcacaagtattaaaacaattttatgataaaattggtgaagtcggtaagtacttcgaaattccaacatacaaataa

SEQ ID NO: 7434 - DNA, 420 bp, Staphylococcus epidermidis; identical to SEQ ID NO: 4234

SEQ ID NO: 7435 - DNA, 1008 bp, Staphylococcus epidermidis; identical to SEQ ID NO: 4235

SEQ ID NO: 7436 - DNA, 1185 bp, Staphylococcus epidermidis
atgaaattatcattaaattcaagttcaaaatttttaagagcccctagtattcgtcaattttctaatagaattaaagcgattgacgattgtgttaatttaacaattggacaacccgattttcctatgccagatgtggtcaaaaatgcttatatcaaagcaatcaaaaacgataaaacaagttattctcataacaaaggtttatttgaaacacgcgaagctattagccaatattttaaacgaaaatataatttcctttatagtgaggaagaaatcatcgttactaatggtgcgagtgaagcattagatacatcgttaagaagcattattgagcctggcgatgatatacttattccaggaccgatatacgctggttatatcccattagttgaaactctaggtggaaatccagtatatatagataccacacaatcagattttaaagtaacacctgaactgattgagtcgcatctaacgcataaaactaaagctatacttctaaattaccctaccaacccaacaggtgtaatactcgaacgctctgaagtcaaaaatatagtagacacacttgtaaacaaacacatttttataatcagtgatgagatttatgctgaaaatacgtttaaaggacaacatacatcttttgctgaatttccagaaattcgagatcaattattacttataggtggtttgagtaagtcccattctgcaacaggtattcgaatcggctttttacttggtcctgaatatttaattgaaaaattaacctttatgcacgcttacaattgtatttgtgcaaatgtaccagctcaaattgcttgtactaccgctttaaatgaagggataaatgcccctctatacatgaatcgtgattatatcgaacgtcgtaattacctgaaagaaaaattagaatcattaggcttcgaattaactgctcaacctgaaggcgcattttacatcttccctagtattaaaagatttacggaaaacgattttgaattttgtgttgatgtgttggagaaagcacacttagctatggttcctggttcttccttcaccgatattggcaaagggtatattcgaatttcatatgcttataatatggaaacattaaaaaaaggaatgcatcgattagaaaattatttacagcaacattatccagagcaaatgaccactccaactaaataa

SEQ ID NO: 7437 - DNA, 819 bp, Staphylococcus epidermidis
atgactagacagtgggaaacacttagagaatatgatgaaattaaatatgaatttttcgaagggattgccaaagtaacgattaatcgtccagaagtaagaaatgcatttactcctaaaacagttgctgaaatgattgatgcattttcacgtgcgcgtgatgatcaaaatgtatcagtaattgtattaactggtgaaggggacaaagcgttttgttcaggtggagatcaaaaaaaacgtggacacggtggttatgtaggtgaagatgatattcctcgtttaaatgtattagatttacaacgtttaattcgtgtgattcctaaaccaataatagcaatggttagaggctatgcaattggtggaggaaatgtacttaatgttgtttgtgatttaactatcgctgcagacaatgctatttttggacaaactggaccaaaagtaggctcatttgatgctgggtacggttctggctacctagctcgtatagttggccataaaaaagcaagagaaatctggtacttatgccgtcaatataatgcacaggaagctttggatatgggcttagtgaatactgtagttccattagaacaagttgaagacgaaacagttaaatggtgtaaagacatcatgcaacactcaccaactgctttacgtttcttaaaagcagcaatgaatgctgatactgatggtttagctggtttacaacaaatggctggagatgcgactttactttactatactactgatgaagcgaaagaaggacgtgacgcgtttaaagaaaaacgtaatcctgattttgaccaattccctaaattcccataa

SEQ ID NO: 7438 - DNA, 804 bp, Staphylococcus epidermidis
atgttacattataatttttatgaatctaagaaccaaagtaagcaattattggtgatgttgcatggttttataagtgatgctactacttatcattcacatatagaacgcctcgtagaacatacaaacgtgctcacaattgacttgcctggccatggcttagatacttcatctatggacgaagtgtgggatttcccgtttattacacgtcaacttgatgaagttttaatacaatatcaaacatatgatgtgtttcttctaggttactctatgggtggccgggtagcactttattatgctatacatggtaatgaaacgctatcagggttgctcttagagagtacttcagcaggtattcaaaatgagacggataaagtagaacgtgcccaagtggatgctgcacgtgcaaaagtacttgaaattgctggtttagatatttttgtgaatgattgggaaaagttaccactttttcgttcgcagtataatctagcacctgagatacgccaaagtattcgcaataatcgcttgaatcaagatgctaataaattggccaaagcacttcgtgattatggtactggtcatatgcctaatttatggccacatctatcattgatacgcattcctactttaattttagtagggaaaaaagataaaaagtttgttcagataggacaacaattagagaatcacttacaagatagtcataaagttcaaatttctaatgtcggacatacaattcatgtggaagatagtacggaatttgatacaataatattaggttttttaaaggaggagcaaaatgactag

SEQ ID NO: 7439 - DNA, 1671 bp, Staphylococcus epidermidis
atgaatcatagtgaagctttaactgaacaagtattttcatttgcttcagagctttatgcttatggtgtaagagaagtagtaattagtccaggttcacgttcaacaccattagcacttgctttcgaagcacatccaaatattaaaacatggattcaccctgatgagcgaagtgctgcattttttgctttaggtcttattaaaggtagcgaaaaacctgtagcaattctttgtacatctggaacagccgctgcgaactacacacccgctatagctgaaagtcaaattagtcgtttgcctctcgttgttttaacgagcgacagaccgcatgaactgcgcagtgtgggtgcacctcaagcaatcaatcaggtaaatatgtttagtaattatgtgaactttcaatttgatttgccgattgctgatggaagtgaacatacaattgatacaattaattatcaaatgcaaattgcaagtcaatatttatatggaccacaccgaggaccgattcattttaatttaccatttagagaaccactaacaccagatttagatcgtgtcgatttattaacatctgtaactaaaacgttacctcattatcagaaatcgatttcggtagatgatataaaagacatattacaagaaaaaaatggtctcatcattgtcggagatatgcaacaccaagctgttgatcaaatattaacgtattcaactatatatgatctgccaatcttagcagatccccttagtcagcttcgtaaagagaaacatcctaatgttataaccacttatgatttattgtatcgagcaggattaaatttagaagtagactatgtcatacgtgtaggtaagccagttatttctaaaaaattaaatcaatggttgaagaaaatcgatgcgtatcaaattattgtgcagaataatgatcaaattgatgtatttccgacaccacctcatatatcttatgagatttcagcaaatgattttttccgttcattaatggaagaaccacttgttgaacgaaaaaaatggttacagcaatggcaatcacttgaacaacaagcacgcattgaaataagtgattacttaaagcatgcgacagatgaagcggcatatgtagggagtttaattcaaaaacttacaaaagaagatacattatttgttggaaatagtatgccaattagagatgtcgataatttactgtttgatagtgaggcatctgtatacgctaatcggggtgccaatggaatagacggagtagtttcaactgcgctaggtatggcggcacataagaatgtgacattgcttattggtgatttatctttttatcatgacatgaacggtttattaatggccaaattaaatgaacttcatattaacattgtattagttaataacaacggaggaggtatcttttcatatttacctcaaaaacgatcggctacaaaatattttgagcgattatttggaacaccaacaggcttaaactttgaatatactgcactgttatatgattttacatttaagcgctttgataatttgactgactttaaatatgctgaattatctaaaatgggttctcacatgtatgaagttataaccaatagagacgaaaatttgcatcaacaccaaaatttatatcagaaattgagtgagattgttaatgttacattataa

SEQ ID NO: 7440 - DNA, 1371 bp, Staphylococcus epidermidis; identical to SEQ ID NO: 4240

SEQ ID NO: 7441 - DNA, 939 bp, Staphylococcus epidermidis; identical to SEQ ID NO: 4241

SEQ ID NO: 7442 - DNA, 558 bp, Staphylococcus epidermidis; identical to SEQ ID NO: 4242

SEQ ID NO: 7443 - DNA, 216 bp, Staphylococcus epidermidis; identical to SEQ ID NO: 5167

SEQ ID NO: 7444 - DNA, 531 bp, Staphylococcus epidermidis
atgaatttttttattaggaaagaaaaaaaggaagattataagattactgaagaagttgtaaaagaagcgtttgctaatgaagaatatagtgatcagagtgaacatagattagttgcgagtttgagaaattctgatgagtttattccagatttatctttagtagcattacatagagataaaattataggtcatatattggtatctaaaatttttattgttaaaggtgagaaatctatagaatcattagctttagcgcctgtttctgtcttacctaattatcaaaataaaggcgtaggtcaaagtttgatacaaaaatctttagaagtagcagaaaagcttaattttgattcggttatagtgatgggacactcagagtattatccaaaatttgagtttaaaaaagcttctaactggggtattaaagccccttttgaagtaccagacgaatttttaatggctattgaattaaagaaaaatgctttggataaaacttctgggataattcaatattcagatgctttttttgaatga

SEQ ID NO: 7445 - DNA, 198 bp, Staphylococcus epidermidis
ttggataaaaacacagtattagataaaggttattttatagcaactatcttaaattccatttttttacttgggttaatttttgtatatcaatctgataatccatatatattaattccatatactattgtgatggttgttaatgctatttatttagttgtaaaagtaggaaaaataaataaaagtaagcccaaaatttaa

SEQ ID NO: 7446 - DNA, 255 bp, Staphylococcus epidermidis
atgaaacagctgaaaataaagaaaatatcaattgaaaattttgcaggtttaaaaaatcaagtttttgaatttaatggcaatgatgcaagagtatacggtgttaatgatacaggaaaaactacaactgctacagcactacaatggcttttatttgatatagggcttgatggttcaactaaatcattcacccctgttcctttagacgaaaacaacaaagaggaatacgagttaacccgtactgtttccgttcattag

SEQ ID NO: 7447 - DNA, 171 bp, Staphylococcus epidermidis
ttgtttttactcatcattaccccccaatctaacgcaatagcgataaccacattatacacgaaaggaatggttattatgcctgaacatattcaacaaatgttatttgatttcgcattagaaagaggatatatcgaaaaacttttagaaatgaaagaagaggatgataaatga

SEQ ID NO: 7448 - DNA, 324 bp, Staphylococcus epidermidis
atgagtaaaaacaataaagatttctctagagctttaaagcgaatgggttctaatgcgcagtctatgaatggcacttcaaatgtagattttaatgatttattttctacagaattcatgaaaaaatacacaaacaaaactgatatatatgaatttatagaagcaagcaatcttgacgttcatagccaagaagatttcaatgtagtaatgcaaactaacgattggaatcattacgtaaaaagaaatactaggtttaattcttggcacgagatgtacgaaaaagctctaggtgaatatacttttaataatttattcaaagggctttag

SEQ ID NO: 7449 - DNA, 135 bp, Staphylococcus epidermidis
atgttaaagaaactaaaaatagcactcctaatcgtcatcttggcggaggagattagaagtgctactaataaaccgacatataaagtaaatgttgatactgatgaattaattaaaaaactaaagccctttgaataa

SEQ ID NO: 7450 - DNA, 765 bp, Staphylococcus epidermidis
atgcaagcattacaaaaaattcaaattgaaaacaactcagaagtaggagcagttgtttctagtcgagtgattgctcaagaactagaaaaaaaacacgctcatgtaattagagatttagaaaaaattttactcagcccaaatgtgggttcagtaataattcctaacgaatataaagatagtactggtagaaaattgaaagaatatttactaacaaaagatggtttcactttatatatgttcaacattcaaggtcataacgatttcaagatggcgtatatcaataaatttaacgaaatggaaaaacaactcaaacaacctgttgcaagttacatgatagaagatcctgtaagacgtgctgagaaatggattgaagaacagaaagaaaaagaaaagttgcttgagcagaactcaatacaacagcaacaaattggcgagttaaaacccaaagctgactatgtggacgaaatattaaaatcacccggaacgatgactatcacacaaattgcagctgattatggtttgtctgcacaaaagcttaataaattattacatcaagcgagattacaacgtcgtgtaggtaaacagtgggtgctatacatcgaaaatatgaacagaggatatacaaagtcgcacacaattgaaatagtccgttcatatggacatccggacactcaaccacagacgcgttggactcaaaaaggcagattaaaaattcacgaaatcatgactgattttggttatgaagcagaagttacggaggtatga

SEQ ID NO: 7451 - DNA, 207 bp, Staphylococcus epidermidis
atgaaaaacgtttatgcttgtttacttggcgaatgggtaaatctatctgaatcaaatgatgttgtaattgataacgcatatacagatgtaaacctttggtataaagaacaaatcgataacttgttcaatttcaactacatcaacattaaaattgataatgtgaattaccgaatccaccctagtttcgttcaagttttaactaagtga

SEQ ID NO: 7452 - DNA, 255 bp, Staphylococcus epidermidis
atggtacttaacttaaaaagattgagagcagaaagaatagcttgcggaataactcaagatgagatgacacaaatgatggggtggaaaacaagaactccatatgctaaaagagaaaacgggattgtagatattggagcgaatgagtttattaaaatggcaaagatattaggctacgaaacaaataatttagatatttttttactcaagacgttcctgaaaaagaacaacaaacaaattaaggaggaattcaaatga

SEQ ID NO: 7453 - DNA, 330 bp, Staphylococcus epidermidis
atgagaaataatgatgaaataatcacaataattaaatcagctatgaaagaacaagatatgtcacttagtgaattagctcgtcgtgtaggagttgctaaatctgctgtatcacgttatttaaacttaactagagaatttccgttaaatcgtacagaagattttgcaaaagcacttagtatcagtacagaatacttacttggttttgacaaaagtgaacaacaagatgaacaaccaaaacatcgtgcagcacatcttgaaggtgaattaacagatgaagaatggcaacgtgtgctagattatgcagattatataagaagcaaacgcaaataa

SEQ ID NO: 7454 - DNA, 462 bp, Staphylococcus epidermidis
atggggttatatgaaaaaatgttaataaaacatgattatatagaagtcagagaaacaaatgttatgcctaatgacctacacggtctatggttaggtgatttaattttaattaagcgaaacctttccgaaacacgtaaagctgaggtattatacgaagaactaacacaccataaacttacatatggaaacatcttagaccaatctaaattcaacaaccgtaaatttgaaaactacgctaggcgttacgggtatgaagctgccctacctttgcgcattattgtggaggcgcataactatggtattagtaacttatatgaactagctgaatatgttcaattaagcgaagaatatatagtagaaatattgaaacattacaaaaataaatatggtattggtactcactacggagaatacctaattacatttgatccgttgagggtttttaaatataaagaaatataa

SEQ ID NO: 7455 - DNA, 519 bp, Staphylococcus epidermidis
atgtctaaaaatataggttttaaaaatggttacgctataggcctaataaaaagtggtttatctaaagaaggtaaaaaagcaatcgactcactaagcgctgaagaacagataagattggctaatttacaaaagaataatgaccctacgcttaacgaagaagtaaggaaagcaatcggaatggatagtaattttactagcattcaagaaaaaagtgaagcttacaataaaaaaagcattgaaaaacaaggaataaataatccgactaaaattacatctaatgctttttattaccaaaataaagcgaatagcttcgacgatatttacaatcttataggtataggtactcatattagccaaaaagaacaagctaaatttgttcattataaagatatgaaaacaaatacttatgtgcaaatagcacaaaatgatgagatagtaaaacaaaataagaaattactagaacaaaatgatgaaattatcaaacttttaaagcaaattctaaacaaaggagaaatgtag

SEQ ID NO: 7456 - DNA, 444 bp, Staphylococcus epidermidis
atgaaaaaggttctttttttaatttttgctagtttattagtattaaccgcatgtgggcaagaagaagaaaagaaagagaaagacaataagacagaaacaactaaaaaagacgagaaaaaagaaacgcaaaagaaaacagaaaataaagaggataaaactaaagaagacacagataataatgaccaacaaagcaatgaacagcaagataatcaagtaaatgaacaacaacaagctcaagaacagcaagcaaaccaacaacaagaaccgtcatatgaagaacaaatgcgtgctaatgcaaaagttgctaaacaaaacggttatacaggtatacccaatggagatatgggtggcgttcctacttctgacaaagcctactctaatgatcaattagaccccgaaactggattacctaaagatgatgctgtcccacaagacacagaataa

SEQ ID NO: 7457 - DNA, 195 bp, Staphylococcus epidermidis
atgatagattacgatgaagtagataaacaattagaaaaaaataaaaaagctcaagctgaaaaaaagactgaacttcagaaagaatacctcgagttatccgataaaatgtttgaagaagatgtaagcgatgaagaatataatgcaatggaaaaacgtcaaaacgaaatattagatgaagtagaaccaatcaattaa

SEQ ID NO: 7458 - DNA, 516 bp, Staphylococcus epidermidis
atgaaaacaccaaatagtgatggtgaaataagaccatgtttaagcaattttaaattctatataggtcaaacgggacaggaagaagaccatcctttattagatttcaacagactaaaagacggttctgaactgggtatagagttcacagttagtggactaaatagagtatataaaaatgatgaaagtaatgctatatctatggttatattatattacgagagagttggacaaaaaggttttaaactaaataatttatggtcagtaaatctggatgatgaggatatgaaagaatcctataaaactttcaaattaactcttacaaaaacctacttgaatctagtcgaaagacaatatgatatgtatttaaactatcctttaattaagataatcactttacctgaaaagtttgattttacagaattagatgaagaaactttgtcacactggatgacttggtcacaacataatgaattactatgcgttaaaataccaatgattcctgagtcggaggagtag

SEQ ID NO: 7459 - DNA, 336 bp, Staphylococcus epidermidis
atggataaattaattgagtataacgaactagcaaataaatttaataaaactattccagatgcacatgatacaacgaaattaagaacaaatgattctggaggtggtaatatgagcggaaactatattactaaagaaatgttcgaacaatttgaaaagcgtatcgacgataaactggattcattgcctaatagaatggccgataaaatggacgctaagataagcggtttagaagctaaacaaacaaaatggttcgtaggaataactataagtacagcaattggagggttgagtttaataatcggtgctatcggattaatagttaatatatttatataa

SEQ ID NO: 7460 - DNA, 597 bp, Staphylococcus epidermidis
atgtcagtaagaaaacaaccgaatggtaaatggtattacgactttggatatgaaggcaaaagatataaaaagaaaggttttaaaactaaacgtgaagctacagaagctgaatctatagccaaaaacaaagtgatgagaggtttagttattaacaacaagacatcattcattaaatactataacgattggataaaggttaacaaagagaatgtggtttctgacaaagcttacgcaacatttaacaatgctattaatcaatttaagttattcttagaaaatgaaaatttaagtgatgtcaccctatcagatttgaatacaacgttttaccgtaaatttattaaatggtatggagatgaccacgctacagaaacagtaaggaagatacacaattgtttaaaacaatctatagacgacgctatacaagaaggattgattcacaaggatccaacgtataaagtgatggttaaaggtcgaatacctgctcaaaaagaagatgaaaagtttatgagcatagaaaattttgtaaatttaaaaaagtatgtatctgatacccctattcaatcatatgtatttgtttatattttaatcatcacttga

SEQ ID NO: 7461 - DNA, 234 bp, Staphylococcus epidermidis; identical to SEQ ID NO: 5089

SEQ ID NO: 7462 - DNA, 480 bp, Staphylococcus epidermidis
atgaagattactatcttatcagtcggaaaactaaaagaaaaatattggaagcaagccattgcagaatatgaaaaaagattaggaccttacacgaaaatcgaaataatagaagtaccagatgaaaaagcacctgaaaatatgagcgacaaagaaatcgaacaagtcaaagaaaaagaaggccaacgcctactcaataagattaaaccccaatccacagtaatcacgttggaaatcaaagggaagatgttgtcttcagaaagactagctaaagaactacaaacacgcatgacacaaggtcaaagcgactttacatttgtcataggtggctccaatggtctacaccaagacgtcttacaacgcagcaactacgcactatcattcagcaacatgacctttccacaccaaatgatgcgcgtcatattaatcgaacaaatttaccgcgcattcaagatcatgagaggcgaagcatatcataaatga

SEQ ID NO: 7463 - DNA, 801 bp, Staphylococcus epidermidis
atgagtcgcttgatacgtatgagtgtattagcaagtggtagtacaggtaacgccacttacgtagaaagtgagaaaggtagcctactcgtcgatgtaggtttaactggcaagaagatggaagaacttttcagccaaatcgacagaaacattaaggacttaaatggaatattagtgacacatgaacacattgaccatatcaaaggtcttggtgtcttagcacgtaaatataaacttccaatttacgcgaatgagaatacatggaaagcgatagagaagaaagatagtcgcattccaatggatcagaaatttatctttaatccatatgaaacgaaatctcttgcaggattcgatatagaatcatttaacgtgtcacatgacgcgattgatccacagttctacatcttccacaataactataagaaattcacgatgattactgacacaggttacgtttcagatcgtatgaaaggtatgattcaaggtagtgatgtctttatgtttgaaagtaatcacgacgtcgatatgttacgcatgtgtcgttatccatggaagacgaaacaacgtattttaagtgatatgggtcacgtatccaatgaagacgcgggccttgcgatgagtgatgtcattacaggtaatacaaaacgtatatacctctctcatttatcacaagacaataatatgaaagacctcgcacgcatgagtgttggacaagtgctcaacgaacacgatatcgatacagagaaagaagtgttgctctgcgataccgataaagcacaagccacaccgatttatacactataa

SEQ ID NO: 7464 - DNA, 792 bp, Staphylococcus epidermidis
atgaactggaaacttacgaagacacttttcattttcgtttttattcttgtgaacatctttttagtcatcgtttatattgataaagtgaataaatcacaagttaatgactcggaaaaggtaaacgaagtcaactttcaacaagaagaaattgacgtgcccaaggatgtcttgaatcaaagcgtgaaagatactgaacttgaacaaattactgcccgttcaaagaatttctcaagttatgcgaaagatcattcaagcctgcaaacgtctgattccgataaaacacttgaaggagatattgataaaggcgttcaagtgagtgataagaacttacaagatatcaaagagtacattgcaaagaaaatctttaacggtaaagagtatcaattaagtgatttaactaaagacaaagtcacttacgaacaaacgtataaagattatccgattatgaataatagtaaagcacgcctaacgtttaatttgagcgatggcaaggcgacaagctataagcagacaacgatggatgatatacaagtagctaaaggttcaaatagcacgaagaaacaagtcatcacaccacgtaaagctattgaagctctttattacaacagatatctaaaacaaaatgatcaagtgctagacgcacgcctaggctattattcagtggtaaaggaaacaaacgttcaattactccaacctaactgggaaattaaagtaaaacataaaggcaaggatgaagttcaaacctattatgtagaagctacaaatcataatccgaaagtgattgattattag

SEQ ID NO: 7465 - DNA, 1338 bp, Staphylococcus epidermidis
atgaataacaaagaacatactaaatcaattattttagtcctactcgtcttgatgagtatcgttttgacatacatggtctggaacttttctccagacctttcaaatattgataacacggataatagtaaaagtgataaacctaaaccacttactaaaccaatgactgcagaaatggaaggaacaatcacaccatttcaaatcgtgcattctagagatgataaatctcaaggaacagtggcatcaggtgcagtcttagacaagatgattcaacctttaaagaatcaagaagttaaatctgtatcacatctgaaaagggaacataaccttgttatacctgaactaagcaacgattttattgtcctagatttcacttatgatttgccactttcaacatacttaagtcaagtactcgatatcgatgcgaaagtgccgaataactttaattttgatcgcctccttatcgatcaagatcataataaccacgtcgtactatatgcgattagcaaagaccgtcatgaagtagttaaacttaagacaaccatgaaagggaataatgttgataaagcttttaaaagtatcgaacctgacatgcagccttatacggaaatcatcacgaataaagatacaatcgacaaagcaacacacgtgtttgcaccaagcaaaccgaaagacttaaagacgtatcgcatggtcttcaatacgattagtgttgaacgcatgaactcaatactatttgatgattcaacgatcgttcgtagctctcaaagtggtacgacaacatacaacaacaatactggcgtcgccaactacaacgataaagatgaaatgtatcattataagaatttatctgaagatgcgaaaagttcaagcaacatgcaagaaaccatcccaggcacatacgagtttataaatagtcatggtggcttcttaaatgaagattatcgcctatttaagactgataatagaacggggaaactcacatatcaacgattcctcaacggtcacccaacgtttaataaacagaacttcaatgaaattcaagtcacatggggggataaaggcgtttacgattatcaacgttcgctacttaagacggacgtcacattgaacagtgaagaatctaaatccgtgcccaccgttgagtccgtgcgttctgcattagccaaccatcctgatattgattttgaaaaggtaacgaacattgcgattggttatgatatggacgacaaggcaaataacgaagatattgaagttcaacgtaactgtgaattaataccacgttggtttgtagaatacgatggcaattggtatgcctataaagatgggaggcttgaataa

SEQ ID NO: 7466 - DNA, 1833 bp, Staphylococcus epidermidis
atgaagtggcttaaacaactacaatcccttcacacgaaactcgttattgtttatgtactactcattattattggtatgcaaatcatcggtttgtattttacgaatagtttagaaaaggaattactcgataacttcaagaagaacataacacaatatgcgaagcaattagacgtcaatattgaaaaggtttataaggataaagataaaggttcagtcaacgctcaaaaggatatccaagaccttttgaatgaatatgcgaatcgtcaagaaataggagaaatacgctttattgataaagaccaaatcatcatggcaacaaccaagcagtctaaccgtggtcttatcaatcaaaaggttaacgacgggtcagttcaaaaggcgctctccttagggcaaacgaatgatcatatggttcttaaggattacggaagtggtaaagagcgtgtttgggtatataatataccggttaaagtcgataaacagacaatcggtgatatatacatagaatcgaaaattaatgatgtatacaatcagctgaacaacattaatcagatattcatcgtagggacagcgatatcactattcattacagtgatactaggattcttcattgcacgaacgattactaagccgataaccgatatgcgtaaccaaaccgtcgagatgtctaaaggtaactacacgcaacgagtgaagatatacggtaacgatgaaatcggtgagctcgcacttgccttcaataacttatcgaaacgtgtccaagaagcacaagcgaatacagaaagtgagaaacgtcgtctagattccgttatcacgcatatgagcgatggtattcttgcgacagatcgccgtggacgtgtacgtattgcaaacgacatggcgctgaaaatgctcggtctcgcgaaagaagatgtcatcggctactacatgcttggtgtccttaacttagaaaatgaattctcattagaggaaattcaagaaaatagtgattctttcttgttagatattaacgaagaagaaggcattattgcacgcgtaaactttagtacgattgtacaagaaacaggtttcgtgacaggttacattgccgtactacatgatgtcactgaacaacaacaagtcgaacgtgaacgtcgcgaattcgttgcgaatgtttcacacgaattacgtacaccactgacatctatgaatagttatatcgaagcacttgaagaaggtgcttggcaagataaagagctggcaccatcattcctatctgtcacacgcgaagagactgaacgtatgattcgtttagtgaatgatttacttcaattatctaaaatggataatgaatcagatcaaattacgaaagaaattatcgacttcaatatgtttatcaacaaaattattaaccgtcatgaaatggcagcgaaagatacaacattcgtacgtgaaattccacagcaaaccatctttgctgaaatcgatccagataagatgacacaagtatttgataatgtcattaccaatgcaatgaaatattcacgtggcgagaaacgtgttgagtttcatgtgaaacaaaatgcactttacaatagaatgacgattcgtattaaagataatggtattggaataccgattaacaaagtagataaaatatttgatagattctatcgtgtagataaagcacgtacacgtaagatgggtggtacaggacttggtctagctatttccaaagagattgtcgaagcacataacggtcgaatttgggctaacagtgtagaaggacaaggtacgtcaatctttattacacttccttgcgaaatcattgaagacggtgattgggatgaataa

SEQ ID NO: 7467 - DNA, 702 bp, Staphylococcus epidermidis
atggctagaaaagttgttgtagttgacgatgaaaaaccaattgctgatattttagaatttaatttaaaaaaagaaggttacgacgtatattgcgcttatgacggtaatgacgcagtagatttaatctatgaagaagaaccagatatcgtcttacttgatatcatgttacctggtagagatggtatggaagtatgtcgtgaagtgcgtaaaaagtatgaaatgccgattatcatgctgacagcgaaagattctgaaattgataaagtattaggccttgaattaggtgcagatgattacgtaactaaaccatttagtactcgtgaactcatcgcacgtgtgaaagcgaacttacgccgtcattattcacaaccagctcaagaagtaagtggtgcgacaaatgaaattacaattaaagatattgtgatttatccagatgcatattcaattaaaaaacgtggagaagacattgaattaacgcatcgtgaattcgagctattccattatctttctaaacatatgggtcaagtcatgacacgtgaacacttactacaaacagtgtggggttacgattattttggtgatgttcgtactgtggacgtaacaattcgccgtttaagagaaaaaattgaagatgatccatctcatccagaatacattgtgacacgtagaggcgttggatacttcctccaacaacatgattag

SEQ ID NO: 7468 - DNA, 1284 bp, Staphylococcus epidermidis
atgtcatcaatcgtagtagttgggacacaatggggagacgaaggtaaaggtaaaataacagactttttagcagagcaagcagacgtaattgctagattttctggtggtaacaatgcgggacatacgattcaattcggtggagaaacttacaaattacacttagtgccatcaggcatcttttataaagataaattagcagtaatcggtaacggtgtagttgtagatccagtcgcattattaaaagaactagatgggttaaatgaacgtggtatttcaactgacaatctacgcatctcaaatcgcgcacaagtcattttaccttatcacctagctcaagacgaatatgaagaacgtcgtcgtggcgataataaaattggtacaacgaaaaaaggtatcggcccagcatacgtagataaagcacaacgaatcggtattcgcatggcagacttattagaaaaggaaacattcgaacgccgacttaaagaaaatattgaatataaaaacgcatactttaaaggcatgtttaacgaaacttgtccaacattcgatgaaatctttgacgaatattatgctgcaggtcaacgtttaaaagactatgtgacagacacagctaaaattttagacgatgcaaatgtggctgatgaaaaggtattattcgaaggtgcacaaggtgtcatgttagatatcgaccatggtacatatccattcgttacatctagtaatccagttgcaggtaacgttacagtaggtacaggtgttggccctacatcagtgtctaaagtgattggtgtatgtaaatcatatacatctcgtgtaggtgacggtccattcccaactgaactttttgatgaagatggccaccatattagagaagtgggtcgtgaatatggtacaactactggacgtccacgtcgtgtaggttggttcgactcagttgtattacgtcattcacgtcgtgtaagtggtatcacagatctttcaattaactcaatcgacgttttaacaggattagacacagttaaaatttgtactgcttacgaattagatggtgaaaaaattactgaatacccagcaaacttagatcaattaagacgttgtaaacctatcttcgaagagcttccaggttggactgaagacattacaggttgtcgtagtttagatgaacttcctgagaatgcacgtaattacttagagcgtatttcagaattatgcggtgtccatatttcaatcttctcagtaggtccagaccgcgaacaaacgaatttattagagcaactttggtag

SEQ ID NO: 7469 - DNA, 1401 bp, Staphylococcus epidermidis
atggatggaatgtatgagcaaaatcaaatgccacatagcaatgaagctgaacaatctgtcttaggtgccattattatagatccagaactcattaatactactcaggaagtcttgcttcctgagtcgttttatagaggcgcccatcaacatatttttcgagcaatgatgcacctaaatgaggataataaggaaattgatgttgtcacattgatggatcaattatcaagtgaaggtagcttgaacgaagcgggtggccctcaatatcttgccgaactatcgacgagtgtaccgacaacacgaaacgttcagtactatacggatatcgtttttaaacatgcgttgaaacggaaacttattcaaaccgctgatagtatagcgaatgatggctataatgatgaattagaattagatacgattttaagtgacgccgaacgacgtattttagaactatcttctactagagaaagtgatggttttaaagatattagagatgtcttaggacaggtatatgagaccgcagaagaactcgatcaaaatagtggtcaaacaccaggtattccaactggttatcgtgacttagatcaaatgactgctggttttaaccgtaatgatttaatcattctagcggcacgtccttcagtaggtaagactgcctttgccttaaatattgcgcaaaaggttgccacacatgaagatatgtatactgtcggtattttctcacttgagatgggcgccgaccaattagcaacacgtatgatttgtagttctggtaacgttgattccaatcgtttaagaactgggacgatgactgaagaagattggagtcgctttacgattgcggtaggtaagctatcacgaactaaaatcttcatagacgatacgccaggtatccgtatcaatgatttacgttctaaatgtcgtcggctcaaacaagagcacggtcttgatatgattgtgattgattatctacaattgattcaaggaagcggatcacgtttctcagataaccgtcaacaagaagtttcagagatttcacgtacacttaaggcgattgcacgtgaattagaatgcccagttattgcactgagtcagttatcacgtggcgttgaacagcgacaagacaaacgtcctatgatgagtgatattcgtgaatctgggtctatagaacaagatgccgacattgtcgctttcttatatcgtgatgattattataatcgtggtgaaggtgatgaagatgatgacgatgctggttttgaaccacagacaaatgatgataacggtgaaattgaaatcatcatcgccaagcaacgtaacggtccaacaggtactgtgaaacttcactttatgaaacaatataataaatttacagacattgattatgctcatgcagatatgtcataa

SEQ ID NO: 7470 - DNA, 447 bp, Staphylococcus epidermidis
atgaaagtaattttcacacaagatgttaaaggtaaaggtaaaaaaggcgaagttaaagatgtaccagtaggttacgcaaataacttcttacttaaaaataaatatgctgtagaagcaactcctggtaacttaaaacaattagaacaacaaaataaacgtgccgaagcagatagacaacaagaaatcgatgatgcaaaagcacttaaagaacagttaaaagatatcgaagttgaagtatcagctaaaacaggtgaaggcggcaaactatttggttcaatcagtacgaaacaaattgccgaagcactaaaaaaacaacatgatattaaaatcgacaaacgtaaaatggacttaccgcatggtattcatgcactaggatatactaatgttccagtgaaattagacaaagaagtcgaaggtacaatccgtgtgcacactgtagaacaataa

SEQ ID NO: 7471 - DNA, 1968 bp, Staphylococcus epidermidis
atgaaccgtcaatccactaaaaaagctttgctcataccgtttattttaatggtactcactgccatagcacttgtcgtcgtgtggtttatttttaaccaattagtagcaggtattgctacagctatactcattgtgatgattattattagtggcgtgttattgagaaaagcatttctaaaaatggatagttatgtggatgatttaagtggtcacatctcggcaagtagtaacaaggcgattaagcacttgcctatagggatgattgtgttagatgaagataatcacattgagtggatgaaccaatttatgacagatcacattgaaacgaatgtgatttctgaaaatgtcaatgaagtcttccctaacatattaaaacaactggaaaaagttcaagaagtagaaatagaaaacaacaattattactatcatgtacgatattcagaaaacgagcattgtttatacttctttgatatgactgaaactgaacgtacaaatgaactatatgaagattccaagccgattattgcaacaatatttttagataattacgatgaaatcactcaaaatatgaacgatacacaacgttctgaaattaactctatggtgacacgtgtgattagtcgttgggcacaagattacaatatttacttcaaacgttacaactcagatcaatttgtagcttactttaaccaaaaaatattggctgaactagaagattctaattttgaaatcttaagccaattaagagagaagagtgtgggttaccgcgcacaactaacattaagtattggtgtaggtgaaggcacggagaaccttattgatttaggtgaattatcacaatctggtttagacctcgcgttaggtcgtggtggtgaccaagttgcaattaagaatatgaacggcaatgtaagattctatggtggtaagactgaccctatggaaaaacgtacgcgtgtacgtgctcgtgtgatttcacatgccctcaaagatattcttactgaaggcgataaagttatcgttatgggacataagcgaccagatttagatgctataggtgcagctatcggagtttcgcgctttgcatcaatgaataatttagaggcatttatcgttcttaatgattctgatattgatccgacattacgtcgtgttatggatgagattgataagaaaccggaactaaaagaacgctttgtaacatcggatgaggcttgggatatgatgacttctaagacgactgtcgttgttgtagatacacataaacctgaaatggtcttagatgaaaatgtcttaaataaagcaaatcgcaaagtagtcattgatcatcatagacgtggcgaaagctttatttcaaatccattacttgtgtatatggaaccttacgctagctcaactgctgagctcgtaacggaattactagaatatcaaccaactgaacagagattgactcgtttagaatcaactgtcatgtatgcaggtattatagtagatacaagaaactttacgttaagaacaggttccagaacatttgatgccgcaagttatttgcgtgcacatggcgctgatacaatcttaacgcagcatttcttaaaagatgatgtcgatacgtatatcaatcgttcagaattgataagaacagttaagatacaagatcaaggtgtagccattgcacatggttcagatgataaaatttatcatcctgtaacggttgcacaagctgccgatgagttgttaagtttagaaggcattgaagcatcttatgtagtagctaaacgtgaagacaacctgattggtatctcagcacgttctttaggttccataaatgttcaattaacaatggaagcgttaggtggcggtggccatctgacaaatgctgcgacacaaataaaaggtgcgacaatagatgaagcaatagaacaattacaacaagcaattacagaacaaatgagtaggagtgaagacgcatga

SEQ ID NO: 7472 - DNA, 912 bp, Staphylococcus epidermidis
gtgttttcaaaaatacaacctaaagcaactattttagcaattatttcattattagtagtcgctttagtaacacatgtattacctgttctcggcttgattttatgtttatttgcaacgattcccggtattgttttatggaatcgttccatacaatcattcggaattagcgcattagtaacagttgtacttacaacattattaggtaatacatttgtcttaagtatgatggtcttaatcttattattaagtgcgattattggacaattacttaaggaaagaacatctaaagaacgaattctttatatttcaacagcttcattaagtttagttacacttattggatggatgttattacaaacattcgataaaatcccgacggcagctgtattaattaagccttttaaaaatgcaatgcatcaggctttcttaacaagtggaatcgattcaaactatagacagattcttgaggaaagtttccgacaaatgacggtccaactccctagttttctaattatagttattttcatttttgtcttaattaatctgattattacatttccaattttacgcaaatttaaagtagcaacacctatttttaaacctttattcgcatggcaaatgagccgtaatttactatggttttatcttatagtacttatttgtgtcatgattgcaagtgaaccaagtacgttccaaagcatcgtgttaaactttgatgttgtgttatcattagtgatgtacatccaaggattaagtgtcattcacttctttggtaaagctaaaagatggccgaacttcgcaacaattcttgttatggtagtagggacacttcttacaccggcaacgcatattgttggattacttggggtaattgatttatgtattaatttaaagaaaataataaaaaaatga

SEQ ID NO: 7473 - DNA, 969 bp, Staphylococcus epidermidis
atgacgaattacacggttaatacattagaactaggtgagtttataactgaatctggtgaaacgattgatcatttacgtctacgttatgaacatgtaggacttcctggtcaaccccttgtagttgtttgtcatgcacttactggcaatcatttaacatacggtacggatgcgcaacctggctggtggcgagaaatcattgatggtggctacattccagttcatgattatcaatttcttacattcaatgtcattggaagtccatttggttcgagttctaaattaaatgatgacaacttcccagaatatttaacattgagggatatcgttagagctattgagttaggtatacaagcattagaatttaagaagattaatattctcattggaggcagtttaggtggcatgcaagcgatggaattgctttataatcgtcaattcgaggtggaaaaagcaatcatattagccgctactgataaaacgtcctcctatagtcgtgcttttaacgagattgcaagacaagctatacatataggtggtaaagaaggtttaagtatcgcacgtcaactcggcttcctcacgtatcgatcgtctaaaagttatgatcaacgttttacaccagatgaagtagtgagctatcaacaacatcaaggtgataagttcaaagaatatttcgatttaaattgttatttaacactgctagacgtcttagatagtcatcatttagatagagggagagatgatgttgatgaagtctttcaatcgttggaaacgaaagtactaactatgggctttattgatgatttactttatcctgatgatcaagtaagagctttaggagaacgttttaaatatcatcgtcatttcttcgtaccagataatgttggacatgatggttttcttctaaattttaatgattgggcgcctaatttatatcatttcttaaatctgaaacaattccgacgtaaatag

SEQ ID NO: 7474 - DNA, 330 bp, Staphylococcus epidermidis
atgacgacagatttacatacattagtacttattattttatgtggcgtggtcacattactcattagagttattccatttgttatgatatcgcgtgtcaacttactagcaattgtaattaaatggctttcttttattcctatcactttatttacagctcttattatagatggtgtaattcaacaacatgatcatgcatttggttatacgcttaatttaccttatattattgcaatcgtgccaactgtgatgctcgctattttcacacgtagtctaacagtgacaattctcgtaggtatatttgtcattgtttgcttacgtttaatcttttaa

SEQ ID NO: 7475 - DNA, 693 bp, Staphylococcus epidermidis
atgactcaccttacgtttaaacaaggtgtgaaagagtgtattcccacgttacttggttatgctagtgtaggactatcgtttggaattgtggcagtctcccaaaatttcagtgttttagaaattattttattgtgtctgattatttatgctggtgcagcccaatttattatttgtacattagtgattgcaggcacccctatttctgcaattgtgcttacaacacttatcgttaactctcgaatgttcttattaagtatgactttaacacctaattataagcaatatggattttggaatagggtagggcttggaacgttattaacagatgaaacttttggcgttgctataacaccatatgttaaaggtgaaaaaattaacgatcgatggctacacggactaaatattactgcttacttattttggactgtttcctgtgtaatcggtgccattttcggagagtatatttcaaatcctgatgcgcttggcctagactttgccattaccgcaatgtttatttttttatgtatatctcaatttgaagggattaagaaatcacgattgagaatatatattgtactcattgtatttgtgattgtgatgatgcttcttctaagttcaattctaccttcatacgtagcaattttaatagccgcaattgttgctgcattgttaggggtggtgatggacaaatga

SEQ ID NO: 7476 - DNA, 984 bp, Staphylococcus epidermidis
ttgaattggcaacgtaaatgtatactaactactttgttggttttaagtagtttatttttagtattttcgactatcacatatgcgagtgaacgtgattttaaagacagtcttaaaatcactacacataacgtgtatttcttacctactgctatctaccctaattggggacaatctcagcgcgctgatttaatttcaaaagcagattacattcaaaatcaagatgtcgtgattctaaatgaattatttgataaaaaagcttcaaaaagattgtcaacacgtctacattcacagtacccttatcaaacacctatcgttggtaaaggtacagaaggttggcaaaatacttctggtacttatagaaaaattaaaaaagtaagtggtggcgttggtattgtgagtaaatggcctatcgtacaacaagaacaacatatttataaaaaaggttgtggggctgatatggcaggtaataaaggctttgcctacattaaaattaataagaatggcaaataccaccatattatcggaacacatctacaagctgaagatccaacatgctttaaaggaaaagataaagacattagacagagtcaaatgagtgaaattaaacagtttataaaagacaagaatatccctaaaaatgaacccgtctatatcggtggtgacttaaatgtcattaaagattcagatgaatatcaacaaatggcaaataacttaaatgtttcattacctactcaattcgatggtaatgcatatagttgggatactagcagtaatagtattgcgaaatataattatcctaaattagaacctcaacacttagattatattttattagatcgtgaccatgcacaaccaagctcatggcataatgatacacatagagtgaagtcaccagaatggtccgtgaaatcttggggaaaaacatacaaatacaatgattactcagatcattacccactctcaggctatgcatcaaatgaatag

SEQ ID NO: 7477 - DNA, 1287 bp, Staphylococcus epidermidis
atgttagacattcgtttatttagaaatgaacctgagaaagtgaagagcaaaattgaattaagaggcgacgatcctaaagttgtcgaccaagttttagaattagatgaacaacgccgtgaattaatcagtaaaactgaagagatgaaggcgaaaagaaataaagtgagcgaagaaatagctcaaaagaaacgtaataaagaagacgctgatgacgtcattgctgagatgcgtcatttaggtgatgaaattaaagatatcgataatcaacttaatgaagtagataataaaattagagatatcttaattcgtattcctaacttaattaatgaagacgtacctcaaggtgattctgatgaagaaaacgttgaagttaaaaaatggggtacgccacgtgattttgaatttgaaccaaaagcgcactgggatttagttgaagaattaaaaatggctgactttgaacgtgctgctaaagtatctggtgctcgtttcgtatacttaactaaagatggcgcattacttgaacgtgctttaatgaattacatgttgacaaaacatacaacgcaacatggttatactgaaatgatgacacctcaattagtgaatgctgatacgatgtttggaacaggtcaattacctaaatttgaagaagatttatttaaagttgaaaaagaaggcttatatacgattccaactgcagaagtacctttaacaaacttctatagagatgaaattattcaaccaggtgtactacctgaattatttacagctcaaactgcatgtttccgtagtgaagcaggatcagctggtagagatactagagggttaattcgtttacatcaatttgataaagttgaaatggttcgtattgtacaacctgaagattcttggaatgctttagaagaaatgacacaaaatgctgaagctattcttgaagaattaggtttaccataccgtcgtgttatcttatgtactggcgatattggtttcagtgctagtaaaacatatgatttagaagtttggttaccaagttacaatgattataaagaaatcagttcttgctctaactgtactgatttccaagcacgtcgcgcaaatatcagattcaaacgtgatgctgcttctaaaccagaattagtacacacattaaatggtagtggtttagcagtaggtcgtacatttgcagccatcgttgaaaactatcaaaacgaagatggtacattaacaattcctgaagcattagtaccatttatgggtggcaaaactaaaattgaaaaaccaatcaaataa

SEQ ID NO: 7478 - DNA, 816 bp, Staphylococcus epidermidis
atgaaaacgttagattctgttaatattcctataagaaaagacgaaacacataaaggtgactatggtaaaattttattaatcggtggatcagccaatatgggtggcgcaatcatgcttgctgcacgcgcttgcgtttatagtggaagtgggctcattactgtagcaacacacccaaataatcatgctgcgctacattctcgttgtcctgaggcgatggttatagatattaatgatactaaaatgcttacgaaaatgattgaagcaactgatagtatccttatcggtccaggtcttggagtagatttcaaaggtaataatgccatcacgtttttacttcaaaatatacaaccacatcaaaatttaattgttgacggagatgctataacaatattcagtaagttaaaacctcaaattcctacatgtcgtgttatattcaccccacatcaaaaggaatgggagcgtttgagcggtatacctattgaagaacagacatatgaacgtaaccttgaagcggtagaacgtattggcgcgacagtagtattaaaacaacatggtacggaaatctatttctgcaatgatgatgtctataaattacctattggcacacctgctatggctacaggtggtatgggtgatacacttgcgggcatgattacaagcttcgtaggccaatttgataattttaaagaagctgttacaagtgcaacttacatgcatagttttatcggtgaaaaattatctgacacaatgtatgttgttccaccttcacgtctaattagtgaaataccgtatgtgatgaaacaacttgaaggttaa

SEQ ID NO: 7479 - DNA, 2682 bp, Staphylococcus epidermidis; identical to SEQ ID NO: 5071

SEQ ID NO: 7480 - DNA, 1932 bp, Staphylococcus epidermidis
atggtgaatacattgtcagatgtaaacaacacagataattatggtgctggacagatacaagttttagaaggtctcgaagcggttcgtaaaagaccgggtatgtatattggttcaacttcagaaagagggttgcaccatttagtatgggaaattgttgataatagtattgacgaggcattagcaggttatgctagtcatattgaagttgtaattgagaaagacaattggattaaagttactgacaatggccgtggtattcctgttgatattcaagaaaagatgggacgccctgctgtcgaagttatcttaactgtacttcacgctggaggtaaattcggaggtggcggatacaaagtatctggcggtcttcacggtgttggatcttcagttgttaatgcactctcacaagatcttgaagtttatgtacatcgtaatggcacgatttatcatcaagcctataaacaaggtgtgccacaatttgatcttaaagaaattggcgatacagataaaacaggtacagctattcgattcaaagccgataaagaaatctttacagagacaacagtttataactatgaaacacttcaaaagcgtatacgtgagcttgctttcttaaataaaggtattcaaattactttaaaagatgaaagagaagaggaagttagagaagactcatatcattatgaaggcgggattaaatcctatgtagatttattaaatgagaataaagaacctcttcacgatgaacctatatatatccatcagtctaaagacgatattgaagtggaaattgcacttcaatataacagtggatatgcaaccaacttattaacgtatgcgaataatattcatacatacgagggtggtacgcatgaagatggctttaaacgtgctttaacacgcgttttaaatagctatggtacgcaaagtaagattattaaagaggataaagatagactttcaggtgaagatacacgggaaggtttaacagcagtcgtatcaattaaacatggcgatcctcagtttgaaggacaaactaaaacaaaattaggaaactctgaagtacgtcaagttgttgatagattattttctgaacactttgaacgtttcttatatgagaatccatctgtaggacgcattattgttgaaaagggtattatggcttcacgcgcacgtgtggctgccaaaaaagcacgtgaagttacgcgtcgtaaatcagcattagacgtttcaagcttaccaggtaaattggcagattgttctagtaagaaccctgaagaaagtgaaattttcttggtagaaggtgactctgccggggggtctactaaatctggtcgtgattcaagaacacaagccattttacctttaagaggtaaaattttgaatgtggaaaaagcacgtttagatcgtatcttaaacaataacgaaattcgtcaaatgattactgcatttggtacgggtattggaggagaattcgatatatcaaaagcacgttatcataaaatcgtaatcatgactgatgccgatgttgatggtgcacatatacgtacgttattacttacattcttctatcgtttcatgagacctttaattgaagcgggctacgtttatattgctcagccgcctttatataaactaacacaaggaaaacaaaaatattatgtatttaacgatagagaactagacaagttgaaacaagaattaaacccgtcaccaaaatggtcaattgcacgttacaaaggtcttggtgaaatgaacgcagaccaattatgggaaacgactatgaatcctgaacatcgctctatgttgcaagtgagacttgaagatgcaattgatgcagaccaaacatttgaaatgttaatgggcgatgtagtagaaaatcgcagacaatttatcgaagacaatgcagtttatgccaacctagatttctag

SEQ ID NO: 7481 - DNA, 1116 bp, Staphylococcus epidermidis; identical to SEQ ID NO: 4132

SEQ ID NO: 7482 - DNA, 237 bp, Staphylococcus epidermidis; identical to SEQ ID NO: 4131

SEQ ID NO: 7483 - DNA, 1134 bp, Staphylococcus epidermidis
atgatggaattcacaattaaaagagattattttattaatcaacttaacgacacattaaaggctatctcacctagaacaactttaccgattttaacaggtatcaaaattgatgctaaagaaaatgaagtcattttaactgggtcagattcagaaatatcaatagaaatcactattccaaaacaagttgatggtgaagaaattgttgaaattacagaaacaggatcagttgtacttcctggtcgtttcttcgttgatattattaaaaaacttcctggaaaagaagttaaattatcaactaatgaacaattccaaacgttaataacatcaggtcattcagaatttaacttaagtggaatagatcctgatcaatatccattattacctgaggtatcacgagatgacgctattcaattgtcagttaaggtactaaaaaatatcattgcacaaactaattttgcagtgtccacctcagaaacacgaccagtacttactggtgtgaactggcttatacaagataatgaattaatatgcacagcaacagattcacaccgcttagctgtaagaaaattacagttagaagatgaatcagaaaataaaaatgtcatcattcctggtaaagctttatctgaattaaacaaaattatgagtgacagcgacgaagatattgatattttctttgcttctaaccaagtgttattcagagtggggaatattaatttcatctcacgtttacttgaaggtcattatccagatacgacacgtttattcccagaaaattatgagattaaattaggaattaacaatggagacttctatcatgcaattgatcgtgcatctttattagcacgtgaaggtggaaataatgttattaaattaagtacaggtaatgaattagttgaactttcatctacttctcctgaaattggtactgttaaagaagaagttaacgctaatgatgtagaaggcggaaacttgaaaatttctttcaactcaaaatacatgatggatgctttaaaagccattgataatgatgaagtagaagtagaattctttggtacaatgaaaccatttatcttaaaaccaaaagatgatgattctgtaacgcaattaattctgcctattagaacatattaa

SEQ ID NO: 7484 - DNA, 1356 bp, Staphylococcus epidermidis
atgtcagagaaagaaatttgggataaagttttagaaattgcccaggaaagaatttcaaacactagttatcaaacgttcataaaagatacgcaactctactcacttaaaaatgacgaagccattatattagtaagtctgcctttcaatgcgagttggcttaatcagcgatattcagaaattatgcaggctattatttatgatgtcatcggttatgaagtgaaaccacattttatttcagaagatgaacttgcatcctacaacaatgtaaatacacaagaagttcaagaaccccaagtacaacattcttctatagatgataagacttggggaaaagaacaatttaatatgcacaatacattcgatacatttgtcattggacctggtaaccgtttcccacatgctgcaagtttagctgttgcagaagcaccggcagaagcttataatccattatttatatatggaggcgtaggtctaggtaaaacacatttaatgcatgcaattgggcatcatgttcttagcaacaaacctaatgctaaagtcatttacacttctagtgagaaattcacaaacgaatttattaaatcaatacgtgataatgaaactgaagcatttcgtgaaaagtatcgtaaaattgatgttttattaattgatgatattcaattcattcaaaataaagaacaaacgcaagaagagttcttccatacttttaatgaattacatcaaaataataagcaaatcgttatttcaagtgatcgtccaccaaaagaaattgctaagctggaagaccgtcttcgctctcgttttgagtggggactaatagttgatatcacgccacctgattacgaaacaagaatggcaatattacaaaagaaaattgaagaagaaaatcttgatattccgccagaagctttgaattacatcgccaaccaaattcaatcaaatattcgtgaacttgaaggcgcattaactcgacttttagcgtactccaaattacaaggaaaacctattacaaccgaactcactgcagaagcgttaaaagatatcattcagtcacctaagtctaaaaagattacaattcaagatatccaaaaggtagttggtcagtattatagtgtaagaattgaagattttagtgccaaaaaacgtacaaagtcaattgcttacccacgacaaatagctatgtatctatctagagaattaactgatttttcattacctaagataggtgaagaatttggaggtcgcgatcatacaacagttatccatgcccatgaaaagattgcaaatgatatcaagtctgatcctacatttaagcaagaagtagaaaacttagaaaaagaaattagaaatcagtaa

SEQ ID NO: 7485 - DNA, 138 bp, Staphylococcus epidermidis; identical to SEQ ID NO: 4128

SEQ ID NO: 7486 - DNA, 141 bp, Staphylococcus epidermidis
gtgcataagcaaaatattatcgctaaagatattatagttattgcgaggcaaccagcaaaagatatgaatacactggagattcaaagtagtttagagcatgtgcttaaaattgcaaaagtgtttaataaaaagattaagtag

SEQ ID NO: 7487 - DNA, 1380 bp, Staphylococcus epidermidis
atggattttgatacgattacaagtatttcaacaccgatgggtgaaggtgctattggaattgtgagattatctgggccacaagctattgaaatcggagatatcttatataaaggtaagaaaaagttatctgaagttgagacgcatacaataaattacggtcatattattgatccagaaacaaatgaaacagttgaagaagtcatggtgtctgtattacgtgcccctaaaactttcacacgagaagatattattgagataaattgtcatggtggtattttaacaattaatcgtatattagagttaactatgacttatggtgcacgtatggcagaaccaggtgaatatacaaaacgtgcatttttaaatggtcgtatagatttatctcaagcagaagcggttatggattttatacgttccaaaactgatcgagcttctaaggttgcgatgaatcaaatagaaggacgtttaagtgacttaatcaagaaacaacgtcaatccatattagagatactcgcccaagttgaagttaacattgattatccagagtatgatgatgtagaagacgcaacgacggacttcttactagaacagtctaagcgtattaaagaagaaatcaatcagttacttgaaacaggagcacaaggtaaaataatgagagaagggttatctacagttattgtaggacgtcctaatgttgggaagtcttcgatgctaaataaccttattcaagataataaagcaattgtgactgaggtcgctggtacaacaagagacgtgttagaagaatatgtcaatgttagaggtgtcccgttacgacttgtagatactgcgggtattagggatactgaagatatcgtagagaagattggtgtagaacgttctaggaaagctttaagtgaagcagatttaattttatttgtgcttaataacaatgaacctctgacggaagatgatcaaactttattcgaagtcattaaaaatgaggatgttattgtaatcattaataaaacagatttagaacagcgattagatgttagcgaactaagagagatgattggtgatatgccacttatacaaacatcgatgcttaaacaagaaggtattgatgaattagaaatacaaattaaagatttattctttggtggcgaagtacaaaatcaagatatgacttatgtatctaattcacgtcacatttcattgttgaaacaagcgagacaatcaattcaagatgcgattgatgctgctgagtctggtatcccaatggatatggtacagattgatttaacacgtacttgggaaattctaggagaaattctaggagaatcagcgagtgatgaattaatagatcaactatttagtcaattttgtttaggaaaataa

SEQ ID NO: 7488 - DNA, 1878 bp, Staphylococcus epidermidis
gtggttcaagaatatgatgtagtagtcattggtgctggtcacgccggtattgaagcaggtctagcttcagctcgccggggtgctaaaacactgatgttaacaattaatttagataatattgctttcatgccatgtaatccatctgtaggtggtcctgcgaaaggaatcgttgtacgtgaaatagacgctttaggtggacaaatggcaaaaactattgataaaactcacattcaaatgcgtatgcttaatacaggtaaaggtccagctgttagagctttacgtgctcaagcagataaagtattatatcaacaagaaatgaagcgtgtacttgagaatgaggataatttagacatcatgcaaggtatggttgatgaactcattatagaagataatgaagttaaaggtgttcgtactaatattggtacagaatatcgttctaaagctgtcattattacaacaggtacattcttacgtggagaaattatactaggaaacttaaaatattctagtggccctaaccatcaattaccatctgtaactctagcggataatttaagaaaattaggatttgatatcgttagatttaaaacgggtacaccaccacgtgtaaatgcgagaaccatcgattattctaaaactgaaatccaaccaggtgatgatataggtcgagcgtttagttttgaaacaaccgaatttattttagatcaattaccttgttggttaacttatacaaatggagatacacatcaagtcattgatgataacttacatttatctgctatgtattccggtatgattaaaggtacaggtcctagatattgtccatcaattgaggataaatttgtccgctttaacgataaaccaagacatcaacttttcttagaacctgaaggacgtaatacgaatgaggtatacgtgcaaggattatctactagtttacctgaacatgttcaacgtcaaatgttagaaaccattccaggtcttgaaaaagcagatatgatgcgtgcgggttatgctattgaatatgatgcaatcgtgcctactcaattatggccaacgttagaaacaaaagcgattaaaaacttgtatactgcaggtcagattaatggaacatcaggatatgaagaagcagcgggacaaggaatcatggcaggtattaacgctgctggtaatgttttaggtacaggtgaaaaaatactcagccgttcagacgcatatattggtgtacttatagatgatttagtcactaagggtacaaatgaaccgtatcgattattaacttcacgtgcggaatatcgattattactacgtcatgataatgctgatttacgtcttactgatatggggtatgaattaggtttaatatcagaagaacgctatgcaagatttaatgaaaagcgtcaacaaatcaaagatgaaatacaacgacttaccgatgtacgtattaaaccaaatgaacatacgcaagcaattattgaagctaagggtggttcaagattaaaagatggcatattagcgattgatttattacgtcgtcccgaaatgaactacgaaacaattttagaaatcttagaagaatcacatcaacttcctgaagcggttgaggaacaagttgaaattcaaacaaaatatgaaggttatatcaataaatctttacaacaagtagaaaaagttaaaagaatggaagcgaaaaaaattcctgaggatttagattatagcaaggtagatagtttagcatctgaagcacgcgaaaagttagctgaagttaaaccattaaatattgcacaggcttcacgaatttcaggtgtgaatccagcagatatctcaattctacttgtttatttagaacaaggtaaacttcaaagggtgaaacaataa

SEQ ID NO: 7489 - DNA, 720 bp, Staphylococcus epidermidis
atgagtattgaatggttatcagagaaattaagcgagcaaggcatagaactatctaatacgcaaaaagagcaatttcaaaaatattataaattacttgttgaatggaacaaaaaaatgaatttgacaagtattactgatgaacatgatgtttatttaaaacatttctatgattcaatagcgcctagtttctattatgattttaacggtcaattaagtctttgtgatatcggtgctggtgcaggttttccaagtatacctttaaagatagtataccctgaattgaaagtaacgattgtagattctctaaataaaagaatacaatttctaaatcatttagctgcagaactaggtcttgaagatgttagttttgtgcatgatcgagcagaaacatatggcaagggtgtctacagggagtcttatgatattgttacagctcgtgcagtagcgagattgactgtcttaagtgagttgtgcttacctttagtaaataaaggtggacagttccttgcacttaaatcatcaaaaggtaaagaagaattgcaagaagcgacgtttgctattaacattttaggtggtaatgtgaaagagacttatacttttgaattacctgaaaatgccggtgagcgacaaatgattattattgataaacgtagacagacatcaaaaaaatacccaagaaaaccaggtacgccaaacaaatctccattagttgaaagttaa

SEQ ID NO: 7490 - DNA, 840 bp, Staphylococcus epidermidis; identical to SEQ ID NO: 4123

SEQ ID NO: 7491 - DNA, 162 bp, Staphylococcus epidermidis; identical to SEQ ID NO: 4122

SEQ ID NO: 7492 - DNA, 360 bp, Staphylococcus epidermidis
gtgtttggtatatcaatttctagtgctatactacatttcgttatcggaggatttgctgttgcacttgcatcaattatggctgataaagtaggaggaaaattaggtggtattattgccactatgccggcagtctaccttgcagctattatagcgttagctatagaccataaaggacagcaacttattcaaatgtcaattcatttaagtacaggagcaattgttgggattgtctcatgtattgtaactgtgttctttacttcaatttttattggtaagaaaaattatagaagtggaacagtatttgcaattctttgctggtttgtgatttctgttgcgattttcttagtcagacatatttaa

SEQ ID NO: 7493 - DNA, 396 bp, Staphylococcus epidermidis
atgaagttagcaattattaaattttcagttggtggtttagctgttttaattagttatattgtttctgtcgtgcttccatggaaggaatttggaggtatatttgcaacctttcccgcagtgtttttagtttcaatgtgtattactggtatgcaatttggcaatgaggtagctatgcatgtgagcagaggtgcagtcttcggtatgataggagttttatgtagtatactagcaacctggggattactacaagctacacatatgtggctattgagtattattggtggttttgtagcttggtttgtaagtgcattgattatttttgaaattgtggaattcatagcacataaaagaagggataaacatggctggaagaccaaaagatccaacaatcaataa

SEQ ID NO: 7494 - DNA, 540 bp, Staphylococcus epidermidis
atggctggaagaccaaaagatccaacaatcaataaaaaaatttatactgagattcaacgtttattggaaacgactcattttagagatattactatagatcaaatttctgagaatactggtatttctaaagcaactatttatagacgttggaaggataaatcttcaattatcatgtccgcgtttattgaacaatctcaatatattgcgattcataatcaagataatttatatgatgatttattccagtttttagtaaaaataaaagatatctataaaacaaaactaggtagtgctgtgattgaaatattaattagtcatcaacaaatggaagctagagaaacttttatgactaattactttaatcataatcgcaaagttttaaaagagattgttcgtaagcacatacaagaggaagaacaagatttgtttattgatttaatcttctcacccatctattttaatatattaattaaacctgaaactctggatgaaaattacattaaaaagatgttgaatcaagttttacgtatatatcattga

SEQ ID NO: 7495 - DNA, 570 bp, Staphylococcus epidermidis
atgaatgttagcaatcaaatcaaaaaatttagagaaagagatgggtattcacaagaatttttggctgagaaaatgtttgtttcaagacaaactatttcaaattgggaaaatgataaaagttatccggatattcataaattacttattatgtgtcaacttttcaagatatatctagacgaactagtggaggatgatttgaaaaacgggcaaatcaaaagtattaaaaaagaattagacttttggacatgtatgatgataattccaatagtattaggaagtgttctcataggtcctatgactcattactttcattggttaggaatgggaataacatatttagtatttttaataggtatcattgcttctacaaaattagaaaaaattaaaataaaaaatgatattgaaacatacgacaagatattagcctttattaatggtaaagatcctaaagaggtgcaaaaaagtaagtttagagatatatggacatcctcaatttcttttattttctttgttggtgtgatcatcggtataagttacttaagtatcattttaactgattattttttataa

SEQ ID NO: 7496 - DNA, 630 bp, Staphylococcus epidermidis
atgagtacacaggaattaaaagaaaatgatattcaaaactcaagtattccatttgttaatcattttaacaaactaagacatcagccaaaatggatacttaaatcaatcatagtgatagtattagctattattagcgctttcatcacatataatactagcaatgaactattagataaccaatcgataactaatagccaaatggatgaaaatatgttacgtatgtctacaactataggcgctttcataggaacaatctttagtgttgttgtagtatttttaatctttctaattatttctaaaatatttaaatctgacgccaaagcgagcagtttattctcagcagcactctcttattcaatcattattttaggatttacaactattatttctttaattcaaatagtttttggactaaaggtaacagactataagcttgatagcttaaacattttttcaaaggataataaaacactcatggctttcagtttaactaatcttttaaaagcctttttaacaggtgttgtttattactcaacaagtcgtttatctaaaaaagcatctgtgatattaggaatcgttgcactcatcatattaataggatcaggtatgataggtggaatgaatagctaa

SEQ ID NO: 7497 - DNA, 1119 bp, Staphylococcus epidermidis
atgaataagaaactattgtggagcattattggtattgtaattattgtcgtattaatcattgctgcttttatattaaaacaagttaatggttcaggtagtaaagatagtaatgcttacgatacatatacagtaagaaaagaaacacctattagtttagaaggcaaagcgtctccagaatctgtgaaaacttataacaataatcaatctgtgggtaacttcttaagtgtttcagtacaagatggtcaaacagttaaacaaggtgaacgtatcatcaattatgatacaaatgggaataaacgccaacaactagtgaacaaagtgaatcaagcacaatctcaagttaatgatgattatcaaaaagtaaatcaaagtcctaacaatcatcaattacaagttaaattgactcaagatcaaagtgctttaaatgaagctcagcagtcattgtcacaatatgacagacaactcaatgacagcatgaatgcatcatttgatggtaaaattaacattaaaaatgattcagatgtaggcgaagggcaacctgttttgcaattaatttcttcaaatcctcaaattaacgcaactatcacagagtttgatattaataaaattaaagaaggcgatgaagtaaatgtcactgtaaatagcacaggtaaaaaaggaaaaggaaaaattcttaaaatagatgaacttcctacaagctatgatacaagtgacgatagtacagcatcatcggcacaagcaggggcacaaggtgatagtgaagaaggaactgaaatgacgacatctaatcctacaattaatcagccaacaggtggtaaaagtggcgaaacatcaaaatataaagttatcattggtgatttagatatacccgtgagatcaggcttctctatggatgctaaaatccctcttaaaactaaaaagctaccaaataacgtgttaacaaaagataataacgtatttgtcgttgataaaaataataaagttcacaaacgtgaaattaaaattgaacgtaataatggtgaaatcattgtgaaaaaaggattgaaatctggcgataaagtccttaaaagtccaaaaggtaatttaaatgatggagaaaaagtagaggtgtcatcatga

SEQ ID NO: 7498 - DNA, 687 bp, Staphylococcus epidermidis; identical to SEQ ID NO: 4115

SEQ ID NO: 7499 - DNA, 1197 bp, Staphylococcus epidermidis; identical to SEQ ID NO: 4114

SEQ ID NO: 7500 - DNA, 2046 bp, Staphylococcus epidermidis; identical to SEQ ID NO: 4113

SEQ ID NO: 7501 - DNA, 192 bp, Staphylococcus epidermidis; identical to SEQ ID NO: 4112

SEQ ID NO: 7502 - DNA, 1881 bp, Staphylococcus epidermidis; identical to SEQ ID NO: 4111

SEQ ID NO: 7503 - DNA, 759 bp, Staphylococcus epidermidis; identical to SEQ ID NO: 4110

SEQ ID NO: 7504 - DNA, 381 bp, Staphylococcus epidermidis; identical to SEQ ID NO: 4109

SEQ ID NO: 7505 - DNA, 645 bp, Staphylococcus epidermidis
atgaaacagctattatttaaaacaagttgcgtaataatggtacttttcacgtcttctttaagtattgtcagtacatattctcatgcaacaacttcaggaggaacgagtagttccagttcggcaagttctagttcaagtagcagtgcagcttctgcatctagaggttcaacttcttcaagtacaagtatgagtcgttctagtgcaataaatgcgtctcgcaatgcacaacaatctagtcagcgtgctgcccaacaagcaacaaaatcaagtcgtgtaacagcaaccaaaaataaaggacaacaaagtgtaacaagacaaaaagcacaatctcgttctttgatgccgtctcaaagaccttatgattcaagtgcaccatactcatctcaatatattgctacaacttattataataattggttattctattatatttttgcacattcgtttttaaatcaacatgaaaagaaaaacagtgtagatgctcagtttcatatgttgaaacaacaaatgaagcctcatgagaaactttatactgttactgtaaagaccaaacaaggaaagcgtgtcgttgtcgtacctaaaaaacaatatgacaaaattgaaaaaggaaaacacattaaagttaaaaatggtgttgttcagtaa

SEQ ID NO: 7506 - DNA, 579 bp, Staphylococcus epidermidis; identical to SEQ ID NO: 4107

SEQ ID NO: 7507 - DNA, 1365 bp, Staphylococcus epidermidis
atggatttcgttaaatcaaaaactgacttatttagactcatagacaatgaagctcaaacatcgacatctaagatggttttattcttaatattaggaactatatttttagatgcatatgatattactattttaggtacaatgactgatcaactcactcaacagtttcacttatcaccagcaacgctatctatagtaatgacctctttacctattggtgcattatttggtgcattacttggtggtacattagcacatcagtttggacgcaagcgtattttatcaattgccttactaacactcactgtaacctctcttggtgcggcactcgcaccaaatgtaattattctaataatatgtcgttgtataatggggtttgctattggaatggatagtccagttgctttcacttttattgcggaaataagtaatttaaagcacaaaggaagaaatgttaactattggcaagtcgtttggtatgttgcaatagttacttctgctttagtggtcactgcgttctttatgctaggggctggtgcacatttgtggagatatgcagttggatttggtgcacttattgcttttgtcttgtacatcttgcgaattaaatatttacacgaaagtccgacatgggtgattaatcattattctttagaaaaagcaactgaatttataagaaaatattatcataaagacatccacctagagggaacgcttgaagatgatttaaattctgatgtgacttcgccacataattcttggacagacttatttaaaccgagatatataaaaagaattatcctggcgactgcgatttcaacattacaaggtatgcagtactatggtgtcggtttatacatacctattattgcaacttatcttattagtaaggataaaataggtgtattattaggtactgctatagtcaatatagcaggtattctaggcgcatatttaggtgctcaattgacttataaattaggtacacgcaagcttacaatgataggcttcacacttgtattactttcaatggtatgtgtaggactcttttatcatcatctaccaatgcttcttaacactttccttattggattatttttatttggccattcaggaggtcctggtactcaaggaaaaacaattggtgccttatcatttccgactcatttacgttcacaagctactggctttgtagaatctgtaagtcgtactggtagtatcataggtacttttgtctttccaatcattcttgctgcagtaggtctaacgaatactatgttaatcttgtccattgtccctttactcggaattatcataacagtatctataaaatgggaagctgtcggtaagcatattgaagtagaataa

SEQ ID NO: 7508 - DNA, 1635 bp, Staphylococcus epidermidis
atgagtatggaaaatcatatagaaagattgattaatcatgttgaaaaaacaatagaaataaaagaatatgcttttttaagccttggaaaatctaatataaaagccaaagttaaattattaaaaaagcctaattaccttagaagggatattactaaagaaattcaaaagtttagacagaaaacaggagcgtttccttcatgggtaaaaatagacattgttactgaagaagaagttactttatttaaagatgttaaagatgaattaacgcaaactagaagaaattatattgattttggtatagctttagatcaatactggaatttatcatttttacctgaagaaataaacactaatgcatttattaaaccagtgaaaacagatgggaaaacgaagcttattctatctgaacaaaatataaataactatttaagaaagtatacgaaccataagaaaaagtttgcttatgatttttatgaaaacaaagaagtcattaagttcaaaactaaaggttttatcttagacgaacaaaagatatatgaattacacgatgaaggttataaaaaaggattaagaaaggtcgattatttacataaagaaatagaccaattaattgaaagtggtacatatttcctaggaaatatgctatcagatactggaagatatcaatatggttattttccacattttgataaagaaatcaatttctataatatattaagacatgcttcttcaacttatgcattaatagagggtttagattatttaggagaagatttaactatagtcgaaaaggcaattaactacgttattgagaattatttctatgataatgaaggtgttggatatatctttgatgatacaaaagatattaacgaaataaaattaggacaaaatgctgcctttatatttgcggtttgtgaatatttaaagcataaccccaataagcaatacttatgcgtggcacaaaaagttgctcgaggaattttatcaatgattaatcaagatacatacgaaacaactcatattttaaattatccggatttaactgtgaaagaatcatttagaattatttattatgatggtgaagcagctttagcattattacgcttatatcaccaagatcataatgataaatggttggaagttgtgaagaagttaatggatcgatttattgaaaaagagtattggcaataccatgatcattggcttgggtattgcacgaacgagttagttcaattgtgtccgcaagataaatattttgaatttgggattaagaatgtgaacacctatttggaatatattgaacaacgtgaaacaacattcccaacatttttagaaatgttaatggcaacctataagcttattcaaaaagcaaaagctacacatcgtcaaaagcttgtgactcagttgattgatgaagaaaaattaatcaatgtgattcatacaagagcagaatatcaacgagtaggatttttctatcctgaaattgcaatgtacttcaaaaatccaaagcgaattcttggtagtttcttcataaaacaccatgggtatcgagttcggattgatgatatcgaacattatatatcaggctatgttcaatatcaaaaggcacagattaaagatgaaatattatag

SEQ ID NO: 7509 - DNA, 1506 bp, Staphylococcus epidermidis
atgatatattctatcggtaagaatttaggtaataaattaacaggtatagaacaagctatgatcaatagattaaagctatttaaagataatttagtcccaaataaactcatattcacatcttggtcaccacgtttatatatgcatgcacattcgttaaacatcgattcaaaagatattttcagtctttacgattttctacaagatagtattaactttgagaaaaaacatattgattggataaattattggcaaaatatatgtaattataccttaaaattcgttgaaaatacgaatgatattaaaatatacgataacgacacatataaaatgtatgtgcattttgttgattcaaattatcaaactttagactatattaaccattttgatatacaacaacgtaaaattcgaagagatttttacgatacaagaggctttttaagttgtagtagaattttaacctctcaacaaaaagtcgtgatggaacaattttttacacctacacaaaaagttaaatttcaaaaatattacaaccctgagcacgaacatcctacggtacaatctatcatttataatacttcacgaggcgttcgttttttcaacgatgaaaatgaacttttagcgtttgcaattaatgcgctatatcatttaggagacgtatttttatgtgataaaaacatcgttacagggccaatcattgatcaaactgatactaaaataccagttctcgccgttttccacagtacccacgtaaaaaatatcaatgatatatatcattctgaaatcaaacaagcgtataaacctgttttagataacttatcccgatattcaggaatcatagtatctactgaacaacaaaaaacagatttatctgtaaaaattaataacgttattcccatttacgttatacctgcaggttatattgatacaaatgaatctcatcatagtagtgacaataaaccattgcctaacaaaatgatttctatcggccgttattctcctgaaaagcaattagatcatcaaatagaactaatgtctaagctagttccagcatttccaaatttacagttacatttatttgggtttggtaaagaagaaacacattatcgtaaattaatagctcaatatcatttagaaaatcacgtgtttttacgtggcttcatttatgatttaaatcaagaaatagagaccgcctatttatctttattgacaagtaaaatggaagggttcaatttaggtgtacttgaaacgattgctaaaggcgtacctacagtaagttatgataccaaatacggaccttctgagttaattgttaatcataaaaatggctttttaattgaacaagataataaagaacaactctatcacagcgttaaaaagttattactcgattctaacttaagagaacaattttctaaggaaagtattaaacatgtccaaatatttaatgacaaaaatgtttttgatacatggctcactgttttcagaacgttaaaagttaatttataa

SEQ ID NO: 7510 - DNA, 549 bp, Staphylococcus epidermidis
atgtttagttatcaaataaataaaaatattaaattaaaaatattagagcaacatgatgcatctcaattgtttcatcttatagattctaatcgtgactatttagcagagtttctaccttttgttaaatacacaaagaaggttgaagatagtaaaaattttatccatagagcattacaacagtttgcgcgaggagatggatttcattgtggtatttggtttaataatgaattaataggggttattggtttacattacttagatttagtaaatcaaaaaacatcgataggttattatttagctgaagactttcaaaataaaggtatcatgactaaatgtactcaagcgttaattcgctatgtatatgaagtgtatgatattaatcgtatagaaatacgaatgtctactaaaaataagaaaagcagagctataccaattagacttgggttcacgcaagaaggtatattgagaagtaatgaacgattacaaggggaattctcagatagttatgtttttagcttgttgagggaagaatgtacgtatactagataa

SEQ ID NO: 7511 - DNA, 465 bp, Staphylococcus epidermidis; identical to SEQ ID NO: 4101

SEQ ID NO: 7512 - DNA, 231 bp, Staphylococcus epidermidis
atgacattattaactaaagttttagatactttaacaggcatatgtgttgctttattgtttaccaagtattttgtaaattatgcaaatgatatgtttgactggcacttaagatggtatttcctagaaaatgtacctcatttagcactcattttgtttattctagtatttatctttgctgttccttctgaaatgattaaagataaaaataagaaaaagcataatgattcataa

SEQ ID NO: 7513 - DNA, 639 bp, Staphylococcus epidermidis
atgaaaggtcttactcttagtatattttatacagctaaaaaatcatttttcatctacttagtagtcggaattattgctgcagtcgttttctcatttttaaatccaacgatgaacagctttcttgctatcatttttttaatatctcctattacggataacttcaaacgtgaaaaggactcaagatggatgaattacatatccacacttcctgttagaagagctgattatgttaaaagttattatattatttttctcttgtgtgcattagttgggatacttgcaggcgtacctagtgtcggtctaatcacacaaagtttaagtatggtattcatttcactatgtgttgccattggtggcgcagggactttctccattatgtttcctctaacattcaaattcggttctgaaaattcaaatgtcattgtgatgactacaacatttgctgtcattattatctatttcttattctatatcgcatcaatgatattgagtaatcaaacaggaagtggctctatgattacaatgctgagcaacacacaaagctatgttgtatattccatttatggaatacttggattgatttcaattattatctcttatattttatcgattaaaatttttaacaagcaagaactataa

SEQ ID NO: 7514 - DNA, 843 bp, Staphylococcus epidermidis
atggaaaacttattagaagttcagcaactcaataaatcatataagaattcagaattccagcttactgacatcacattctctgttaaacctggcgaggtagtgggtttaattgggaaaaatggttcaggtaagtctaccctcattaatacacttgtaggaaatagacataaagataatggttcactgaaattcttcgataaagaggtgacagagaacgacttcaaatataaagaacatttaggtgtagtttttgatgatttacgtgttccagataaattaactatacaatctatcaataaagtttttactgaaatatatgatgcttggaacagcgatacattcttttctttaatcaaagcatttgaactaccaacaaataatcaaattaagacattctcaagaggaatgcgtatgaaagcagctttaacaattgctttaagccatgatgctaaattattaatcttagatgaagctacagcaggtatggacgtatcaggacgtgaacatgtgttagaaattctagaggattatttaggagacgatcgtgccatattaatttcatcacatatttctgaagatattgaacagctagctactcagctcgtttttatgcgtgatggtcgaattattttaaaagaaagtaaagaagttttattgagccaatacggcatcatcgatcaaccagttgagcatttcaatatttcaaatgagtatctaatcgcaacgcgcagacgtaatgatcgacaaatcagtttagtgaataactatcaaaaagtacctgatgcacaaccactaaagacaatcgatgatgcaactaaaattattatgcgaggtgaagtataa

SEQ ID NO: 7515 - DNA, 735 bp, Staphylococcus epidermidis
ttgaaaataaaaaggtatgcacttctatgtttattaggaggattagttggaggcatcatcggatacatcataggagctattaactgggagaagttatttaattatgcacagttcgctaactttaaagttgtgctttatacaaccatcgtagcatcattaataaatattatacttactgtgtatttatttatagtccaaaatgcgtcacttcactataaagctaaaattgacgcaaatatttcagatgatttagcagatacatatgaaaataaatcatacatcaaatcattgaaagtaagatttatttacacaatgcaattaattgtcgcttttattgcaattttaatacccgtcataggaaatgcatctgagaatcacatcgctctaataatgattcctttcattattacaatcatttcatccataatgattgggatattttatagaaaatttgatgctcgataccctaaattaggagagaaacgttacactgaaaaagcatttaatattatggacgaaggagagcgatacatcacactcgtttccttgtataaagtgcaccagcagaatattgtattactttttataggaattatgaccctggggatattctcaataactacaggcatgaatcaatcactaggcataattttgtttatcattttatttatctataattcattgggatatttactgaaagtcagtaatttttataaatcagaacagaaatcctaa

SEQ ID NO: 7516 - DNA, 204 bp, Staphylococcus epidermidis; identical to SEQ ID NO: 4096

SEQ ID NO: 7517 - DNA, 201 bp, Staphylococcus epidermidis; identical to SEQ ID NO: 4095

SEQ ID NO: 7518 - DNA, 156 bp, Staphylococcus epidermidis; identical to SEQ ID NO: 4094

SEQ ID NO: 7519 - DNA, 1185 bp, Staphylococcus epidermidis
atgtcacgcatagtattagctgaagcatatcgaacacctataggcgtgtttggtggtgtatttaaggatatacctgcctatgaactaggtgcaacagttattcgtcaaattttagaacatagtcaaataaatcctaatgaaatcaatgaagttattctaggaaacgtattacaggcaggtcaaggacaaaatcctgctcgtattgctgcgattcatggtggtgtgccagaagcggtaccttcttttactgtaaataaagtttgcggttctggattaaaagcgattcaacttgcctatcaatctattgtagcgggagataatgagattgttatcgctggaggcatggaaagtatgtctcaatctccaatgcttcttaaaaatagtcgtttcggttttaaaatgggaaatcaaactttagaagatagtatgatagctgatggtttaactgataagtttaatgattaccatatgggtatcacagccgaaaatctagttgaacagtatcagattagtcgtaaagaacaagatcaatttgcattcgattctcaacaaaaagcatcacgtgcacaacaagctggtgtatttgatgctgaaattgtacctgtagaggtaccacaacgtaaaggcgaccccctaattatttctcaagatgaaggcattagacctcaaacgacaattgataagttagcacaactccgtccagcatttaaaaaagatggatcagtaactgctggtaatgcatccggtatcaatgacggtgctgctgctatgctcgttatgacggaggacaaagcgaaagcattgggcttacaacctatagctgtattagatagttttggtgcgagtggtgtggcgccttcaattatgggtattggtccagttgaagcgatacataaagctttaaaacgttctaataaagtgataaatgatgttgatatttttgaattaaacgaagcttttgcagcgcaatcaattgctgtaaaccgtgagttgcaattaccgcaagataaagtcaatgttaatggtggtgcgattgcactaggacatccgataggggcttcgggtgcgcgtactttagtttcattattacatcaattaagtgatgctaagccaacaggtgtggcatctttatgtatcggtggcggtcaaggtatcgctacggttgtatctaaatatgaagtttaa

SEQ ID NO: 7520 - DNA, 744 bp, Staphylococcus epidermidis
atgtcacagtatccactttggaatcaattaaatactttaaaagaggctcagtgggtcgatttaacacatactttcgacccaaatatccctcgttttagcgaatttgaaaaaggtgaagtctcaacgctattcaatgttaaagatcatgggttttatgtacaacgttggagtatcgtaactcaatatggaacacacattgatgctccaatccatttcgttgaaaatagaagatatttagaagaattagatttaaaagaacttgttttaccattaattgttttagattattctaaagaagctgcacaaaattcagattttatcgtatcacgtaaacatttagaagattgggaacaacaacacggtcgcattgaagcaggtacttttgtcgcattacgtactgattggtcaaaacgttggccagatatagaaaaatttgaaaataaagatgtagatgaccatcaacatcttccaggttggggccttgatgcattaaaatttctcattgaagaacgtggtgttaaatccataggtcacgaaacatttgatactgatgcctcaattgatacagctaaaaatggtgatattgttggcgaaagatatatcttaggtcaagacacattccaagtcgaattacttaccaatttagatcaattacctaccagaggtgcaattatctatgcaatcagcccaaaaccaaaagatgcaccaggctttccagttcgtgcattcgcaataaaaccttaa

SEQ ID NO: 7521 - DNA, 2247 bp, Staphylococcus epidermidis
atgacaacaattaaaacttcaaacttaggattcccaagattaggtagaaaaagagaatggaaaaaagcaatcgaaaattattgggcacataaaattgacaaagcagaattagatcaaacactgactgatttacacaaagaaaatcttttacttcagaaaaattatcatcttgatagcattccagttggggatttctctttatatgatcatattttagatacgtctttattgttcaatattatccctgaacgtttccaaggacgcgaagtcaatgatgatttattatttgatattgctcgtggtaacaaagagcatgttgcaagtgcacttattaaatggtttaacaccaactatcactacattgtacctgaatgggacaacgtagaacctaaagttgaaaaaaatacgttattagaacgttttaaatatgcacaatcaattaatgtaaatgcgcatcctgtaattgttggtcctatcacatttgtaaaattatcaaaaggtggtcatcaatcgttcgaggaaaaagttgaaacattacttcctttatataaagaagttttacagtcacttgtagatgcaggtgctgagtatattcaaattgacgagcctattctagtgactgatgacagcgaaagttatgaagacattactagaaaagcatacgactatttcgcaaatgaaggtttaggaaaatatctcgtcattcaaacttactttgaacgtgttcacttaaaattcttaagttcattaccagtgggcggtttaggattagatttggtacacgataacggctataacttaaaacaaattgaagatggtgatttcgatcaaagtaaagcactttatgcaggaatcattgatggcagaaatgtatgggcggctgatattgaagcaaaaaaacaattaatcgaaacattacaacaacacacacaacagttagtcattcaaccttcatcatcacttctacatgttccagtatcactagatgatgaaacacttgatgaatctattgcagaaggattaagttttgctactgaaaagttagacgaattagatgcattgcgtcgcttattcaatgataatgacctgtcaaaatatgaacattacaaagcacgttatgaacgcttccaaagccaatcatttaaaaatcttgaatacgattttgaaagtgtaccgacacatcgtaaatcaccatttgctaaacgcaagcaattacaaaaccaacgtctaaatttaccagatttacctacgactacgattggttcattccctcaaactcgtgaagtccgtaaatttagagcagattggaaaaataatcgcattacagatgctgagtatcaagaatttttacaaaatgaaatcgctcgttggattaaaatccaagaagatattggtttagacgtacttgtacacggtgagtttgagcgtaacgacatggttgaattttttggggaaaaacttcaaggtttcctagtaacaaaattcggttgggtacagtcttacggttctcgtgcagttaaaccaccagttatatatggagatgtgaagtggactgccccacttactgtaaaagaaacagtatacgcgcaaagcttaactgacaaaccagtaaaaggtatgcttacaggtccagttactattttaaactggtcatttgaacgcgtagacgtacctagaaaggttgttcaagatcaaattgccttagccattgatgaagaagtgttagctttagaagaagcaggtatcaaagtcattcaagttgacgaaccagcgttgcgtgaaggcttacctctacgctctgaatatcacgaacaatatttagaagatgctgtacattcatttaaattagcgacatcatctgtgcatgatgaaacacaaattcatacacatatgtgctattctcaatttggacaaatcattcatgctatccatgatttagatgcagatgttatttctattgaaacttctcgtagtcacggagacttaattcaagatttcgaagatattaattatgatttaggaattggattaggtgtttacgatattcacagtccacgtattccaaccgaagaagagattactactgcaattaatcgttcattacaacaaattgatcgttctctattctgggttaacccagactgtggtctaaaaacacgtaaagaaaatgaagtgaaagatgcattaacagtgttagtcaatgcagttaaaaagaaacgtcaagaatctgaatcaacaacagcataa

SEQ ID NO: 7522 - DNA, 1839 bp, Staphylococcus epidermidis
atgagtcatttactgaaccaattaaagagcaacgttttagtagctgatggcgctattggaacaatattctactcggaaggtcttgatacttgtccggaagcctacaatcttactcatccagataaggtcgagcggattcatcgttcttatatcgaagctggtgcagacgtcattcaaacgaatacgtatggtgctaactttgaaaaattaaagtcctttggtcttgaacataaagttaaagaaattcaccaagctgcagttcaaattgctaaacatgcagcaaatgaggacacaattatacttggaacggtaggtggattcagaggcgtccggcaagaggatatcagtctttcaacaattcaatatcatacagaacttcaaatcgatacattaattgatgaaggtgtagatgcccttctatttgaaacttattacgatttagatgaattaactcgcatcgtcactgctacacgacaaaaatacgatattccaatcatcgctcaactcaccgcttcaaatacgaattacttagttgatggcactgaaattaatgcggcattgaaatacgtagttgaatgtggcgccaatgtagttggattaaattgtcaccatggcccacaccatatgcaacgatcattttcacatatagaacttcctaaacatgcgtatttatcgtgttatccaaacgctagtttattagatatcgagaatagtgaattcaaatatagtgataatgctcaatatttcggagatatagctcaagaattaattaatgagggagtcagattgataggtggttgttgtggtacaacacctgaacatattcgctatattaaatcagcagttaaacatttaaaacccgttaaagataaaaaggtaatccctattaataaagcttcatctcaaaagcaaacgcgagttcttaaacaaaaccttacttctaaagttaaaaatggcccaacagtcatcgtagaacttgatacacctaaacatttggatactgatacatttttcgataatgtaggcaaattagatgaagctggcatagatgctgttacattggcggataattcattagctaccgtaagagtgagtaacatcgcagcggcaagtttaattaaacaacgctacgatattgagcctcttgtacatgtaacatgtcgtgaccgtaatttaataggattacagtctcatctcctaggtttatcactcattggtgtcaatgaaatactagctattaccggagatccttctaaagtaggccatttgcctggagctacaaatgtctatgacgtgaactcaaaaggccttacagaacttgcactaagatttaacaaaggtattaacactgacggcgatgcgctgaaaaaacatactaactttaacatcgctggtgcgtttgatcctaacgtacgaaaattagatggagccattaaacgacttgaaaagaaagtagcaagtggcatgagttatttcataactcaacccgtttatagtaaagaaaaaattattcaagtatatgaagaaacaaaacatttaaatacacctttcttcataggtatcatgccaatcgcaagttataacaacgcacttttcttacataatgaagtgcctggcatcaaaatgtcagacgatgtacttaaccaattcaaagctgttaaagatgataaagaaaagactaaagaattaagtttaagactttccaaagaactcattgatacagtacatgaatacttcaacggtctgtacattattacacctttccaaaaggtagattattcattggaactcgcagcatactctaaatcaatcactgccaacaaggaggcaatattatga

SEQ ID NO: 7523 - DNA, 1176 bp, Staphylococcus epidermidis
atgagtttatctaaagaaacagaagtaatattcgatgtgcgtagaggtaaagactacgactcagctaacccgccactttacgattcatctacattccatcaaaaagtgttaggcggtgagactcaatatgattatgcacgaagtggtaaccctaaccgaactttacttgaagagaaacttgcacgtttagaaggtggtaaatatgcatttgcttatgcttcaggcattgctgcaatttcagccgttttactcacattaaacgcaggggatcatgttattttacctgatgatgtttacgggggcacatttagattaactgaacaaatactcaatcgattcaatattgaatttactacagttaacgctacacatatagatcatatcactgaagctattcaatcaaacacaaaactcatctatgtagagacgccttcaaatccacttttcaaaattacagatattcatgctgtagcaacgctagcaaaggaacataagatactattagctgttgataatacgtttatgacacctttgggtcaatcacctttagcactaggcgctgacatagttattcatagtgcaactaaatttctaggtggacatagcgatttaattgcaggtgcagcaattactaataatagagaggttgcaaatgcattgtacttattacagaacggcacgggcacagccctttctgcatatgatagttgggcacttgcaaaacatcttaaaacattaccagttcgttttaaacaatctgttcataatgctgaacgtcttgttcaatttttgagtcaaagagaggagatttctgaggtgtattacccaggaaataatcctacacatctcaagcaagcttcaactggaggtgcagtgataggtttccgacttaaagatgaatctaaagcacaaaagttcgtcgattctcttactttaccacttgtatcagtgagtctcggtggtgtagaaactatcctatcacatcccgcaacaatgtctcatgcagcagtgccagaagatgtgagacgtgaacgtggcatcactttcgggttattccgtttaagtgtaggtcttgagaatccagaagaactcatcgcagattttaactacgctttaaaggaggctttcaatgagtcatttactgaaccaattaaagagcaacgttttagtagctga

SEQ ID NO: 7524 - DNA, 1104 bp, Staphylococcus epidermidis
atgaaggatacagatttagctcaaattgctttaacacaagatcacactggcgcaattgccaatccaatatatttatctactgcatatcagcatcctcacctaggtgaatcaacaggctatgattatacacgaactaaaaatccaacaagaacagcctttgaagaagcttttgcacaacttgaaaaaggcattgcttcatttgctacttccagtggtatggcggcgattcagttaatatgtaatatattcaaaccaggtgatgaaattctcgttgcatttgacctatatggtggaacatttcggttattcgatttttacgaaaaacaatatggtttgaagtttaaatatgtagactttttaaattatgaagaagtggaaaaaaacatcactccacaaactagagcattatttattgaaccaatctcaaatccacaaatgattgaaattgatgtagaaccatattatatccttagcaaaaaacatcaactattaacaattatcgacaacacttttttaacaccttatctttcgacaccactcgaagaaggtgcagatatcgttctgcattcagcaacaaaatatattggcggacataacgatgtgttagctggagttgtaactgttaaggatgctcaattagctgaacaattgaatcaattccataatatgattggagcaactctatcacctcttgatagttatcttttacaaagaggtctaaagacattacatcttcgcatagagcgttcccaagaaaatgctcaaaaacttgcacaacgatgtcgccagtcagattcaattgatgaagttttatatagtggacgaacaggcatgcttagtttaagactgaaccaagcatatagcgtcgctaaatttttagaaaatttagaaatttgtatatttgcagaaagcttaggtggtacagaaacatttatcaccttcccttatacacaaacacacgttgatatgccagatgaggaaaaagacaaacgtggaattgatgaatatctcatcagattgtccgtaggtatagaagactataacgatatagaagctgacataattcaagcattagagaattctaaagtaggagtgatttcatga

SEQ ID NO: 7525 - DNA, 843 bp, Staphylococcus epidermidis; identical to SEQ ID NO: 6881

SEQ ID NO: 7526 - DNA, 876 bp, Staphylococcus epidermidis; identical to SEQ ID NO: 6882

SEQ ID NO: 7527 - DNA, 204 bp, Staphylococcus epidermidis; identical to SEQ ID NO: 4085

SEQ ID NO: 7528 - DNA, 1098 bp, Staphylococcus epidermidis
atggctttaacagcaggtatcgtaggtttgcctaacgtaggtaagtctaccctatttaatgcaattactaaagctggcgcattagcagcaaactatcccttcgcaacgattgatcccaatgttggtatcgttgaagtgccagattcacgtttaataaaattagaagaaatggttcaacctaaaaaaacaattcctacaacttttgagtttactgatattgcaggtattgttaaaggtgcatctaagggcgaaggtttaggaaataaattcctttcacatattcgtgaagtagatgctatatgtcaggtggttcgtgcgtttgacgatgagaatgtaacacatgtatcagggcgtgttaatccgcttgatgacatagaagtcattaatatggaacttgttttagcagatttagaatctgttgaaaaacgtttaccgaaaatagagaagatggctcgtcaaaaagataaaacagctgagatggaattacgtatattaacacaaattaaagaagcgttagaagacggtaaaccagtacgcagtattgatttcaatgaggatgatcaaaagtgggttaatcaagctcagttattaacatctaagaaaatgttatacattgctaatgttggtgaagatgaaattggagataaagataatgataaagtgaaagcaattcgtgaatatgcagcaaacgaagattcagaagttatcgttattagtgcaaaaatcgaggaagaaatcgctacattagatgatgaagataaagaaatgttcttagaagatttaggcatcgaagaaccaggtttagacagactcattagaacaacatatgatttgttaggtttatctacttactttactgccggtgtgcaagaagtgcgcgcttggacatttaaacaaggaatgactgcaccacaatgtgctggaattattcacactgattttgaacgtggttttattcgtgcagaggtaacaagctatgaagattatgtacaacatggtggcgaaaatggtgctaaagaagcgggaagacaacgtttagaaggtaaagattacatcatgcaagatggggatattgttcatttccgttttaatgtttaa

SEQ ID NO: 7529 - DNA, 192 bp, Staphylococcus epidermidis; identical to SEQ ID NO: 4083

SEQ ID NO: 7530 - DNA, 810 bp, Staphylococcus epidermidis
atgttaaagaaattttcttactcaatcatttcactttcaattttcgctactagccttaattttatagatactcaagcacaagcgtcttcatcttctgtaagcgaaaaaggtacaatggggtatggctatcaacaatacttaaaagaccatcctaaaaagcaaaatcataaaacacaaaatcgttctactttctctgctgaatctaatattactgaaacaaataatggtgaaagagtcttagatatttctgaatggcaaggacttttaactaatgaacaaataaaacaactaaagaaaaattatgattttattattttaagagcacagtacggttcagaatacgttgataagacttttgaaaaaaatgcagaattattagaacaaaataaaatgaaatacggcgtgtactcttatagcatgtacgaaagtccaaaagatgcacgttatgaagctaaaactttatctcaacgtgctcccaaagccgccttttacattaatgattatgaagaacaaaccgttaaatccggagatgatgaaacagcgacacaagcatgggcaaacgaaatgagaaagcttgctggaaacaagaagatccttttttattcatatgaaaatttcatgttaaatcatgcatcaaatgctgtcagttcatatgatggctactggttagcagcatatcaagctgaggaaccaaaacgagagaaagtgctatggcaatatacagatagttactactctcctgaattaaatcaaaatgtcgatgcaaattatattgacgaaaatgtgaattcgtcttggttcacttcataa

SEQ ID NO: 7531 - DNA, 297 bp, Staphylococcus epidermidis; identical to SEQ ID NO: 4081

SEQ ID NO: 7532 - DNA, 510 bp, Staphylococcus epidermidis; identical to SEQ ID NO: 4080

SEQ ID NO: 7533 - DNA, 243 bp, Staphylococcus epidermidis; identical to SEQ ID NO: 4079

SEQ ID NO: 7534 - DNA, 1236 bp, Staphylococcus epidermidis
atgtggcatgagaaatttactaacaaacatggtgatgtacaatatcgctattatgagaagtacaaagatccactcacaaacaaatggcgacgtgttagcgtggtacttaataagaatggtaagcagtcacagaaagaggctcagaaacgcttaaatgagcgtatagaggcaaagctgaatgataagacacctactacacttaagtcactaactttccatgctgcatgtgatgagtggttagagtattataaaaatcattctggttcaaaggctacaacaatcaaagaaaagattagcaatacaaacacagttaaaaatgctattgataaagaagtgctgataaataacatcacacatacatacctacaagatattattaacgagtgggctaaattacatagtaaaggtcatgttcaatcactagttatcattattcgttcagtgttcaaatatgcgtttaaatactatgatctacaagatataagtgtactagataaaattgatatccctaaaaaagctaaaactagggatgaactacaagctaaacgaaacaattatttagaagatagtgaagttaaagagttattgaattgtttcgattacctaattaagcacaaaaaacattcaacaagaaagcgtaattataaaatggtcaaagctatagtacagtttcaaattgccaatggcatgcgtatcggcgagctacttactattaaatcagacaatataaactatgaagataaaactctagatattgacggtacaattaattgggtaactgataaagaaacgggaacatttggagtaaaagaaactactaaaacaagtaaaagttatagaactattgggcttactacccaaagtatcaacttactcaaaacacttattttggataataagaaagaaaatcagtggaatgaagattttattgatagaggttatgtattcactaatacagctggtagtcctatcgacttgaataaaataaacaacatcatcaaagaggctactgatattagctcaataaagaaacgtgttacaacgcacacattacgtcacacgcatatatccacacttgcgcaattagggattaacctaaaagctatacaagagcgtgtaggacactcggactataaaactaccctagagatatacacacatgttactgatcagatggctaaagatatgatgaaaaaattggaattcatcaaaattaaaaatagagggagtgaatga

SEQ ID NO: 7535 - DNA, 594 bp, Staphylococcus epidermidis
atgaaaaaattactaggaacattatttgcagctacacttgtgttaagtgcttgtagtcaagatgatactaaggaagatgaaaataaaaaatcagaaagcactactgaaaagaaagctgacgataaaaaagataagaaaactaaagaagataaaaagtctaaagaagataaaaaatctcaagaaaatgaagataacaaatctacacaagaagataactctactgaagaacaacacacacaagaaactgctacaaatgaacaagttcaatctcaacaacctgcaactcaagagcagcaaacacaacaagttaataacaatcaacgaactcctcaacaacagcaaaataaccaaaactataatcaaactcaacaacctaatcaaaatgtaaagttacctaaaaatacagagattgatgatcagtatatacatggtgaagttgctaacgccctagaccgtaaaactgaaatcgaaagacaagctaacgaagattatgaaaatggaaaaattagtgaaagtgaaatgatgaatagacaacaacaagcttcccaaattttaaatcaagcagtagaaaatcaatatggaccacaagattaa

SEQ ID NO: 7536 - DNA, 909 bp, Staphylococcus epidermidis
ttggataaagtagaagtcggtaaaaggataagaaaaattcgtagccacttaggacttactatggatcaatttggtgaaaaaattgataaagaaagtcctgtaaaatcgggagtagtttcgaattgggaaaatggaaaacaacttccaaataagaaaagactaaaaaaaatatcagaattaggtaatgtaagtttagacgaattattatatggttctatgtacaattatattgttgaaaacataaatattgattacgataaacttaatattcctaaagaagaaggtacttatcaaaaatcattaattgttactatgatgatgaatgatatacaaactaaagagaatagaagaatgattgaaagttctataaatgaagagaattatgtacccttaacatatagtcaatttctcgaaaaagttgaaatagaattgccaaaaaaactgaattctattattgaaaaaggaaaaatcgctattcaagaacttaaaaagaaagacaaagagattttaaaaaatcattctgatttaaatatagttagtaaaattcttaataatgaatatgtgacttttaatgacattttattagaacacttttttatagaagtattttcattagaaaattatacttttgaacaagaaatttatgtggataaaatggatcaaattaagtcaattttattaagatatttcactgaaaaatatatcaacaacgatttaagtaacactctcactatagaacaactagaaaaattaaaagaagattccttgtatatgtctgaaatattagaatatgatcctttctttaaagacaacgaaaaagttaatgaagacttaataaaaatttttaataataaaattcctagacacttaaataaaaaaatagagttcgctaaaaaaggagaactgtaa

SEQ ID NO: 7537 - DNA, 201 bp, Staphylococcus epidermidis
atgaacaaaatagtaggttatagaaaaatgctaggtatgacacaagaaaaaatggcagaaaaatttaatatttcagtacaagcttatcgaatgaaagaaaaacaggagattaattttaatcgaaaagagatgattatttttagagatttattaagaaaagaattatttcctaaaattactattgatgaaatatttttttaa

SEQ ID NO: 7538 - DNA, 273 bp, Staphylococcus epidermidis
atgccatatactaaattacaagatttaccaactaaacagaatactgcacttgaagaaaagcaaatcgtattcccagtcaaatacgcaaaaccgaagctaatctgtgaaatcttcaatattagttactcaactttctatcgacttctaaagtcttatgaagatgacaatttagacattgaagatatgtatatcgacattagcagcacactaacacttgtgaacgtagaacagtttgaaaagtatttaaaagcaaaacacaaaaaatatttataa

SEQ ID NO: 7539 - DNA, 384 bp, Staphylococcus epidermidis
atgaaaacattaagtaaagaacaaactaaaaatattatgtatcaattatatgcagatcgtataggctcaaaagagaatttaacttttgatgaaagatttaacagagatagagcaataattaaagtactttttgaacgttggggcatggaaccagaagaaaatgataaattagctggttctttagcactaatgtacagacgtgtatttaaaacatatggagatgctagaaatctattagatgctatggatggagatatgcaaaatttagcaaaattttctcgtgaagatgatttgaacgatttatttttattacaaaaaagtatcaatgaattaatcgaaaaaattaaagagcaacatgaagattatattatcttttataaataa

SEQ ID NO: 7540 - DNA, 159 bp, Staphylococcus epidermidis
atgatgaaattcctaattaaattattactcatctcattaatttcattccttagtggttggcttttaggaatatatgtagctttcgctatttacatgttaggtagtgtgattgcagcattaaatattgaagaaaatggaggagtagtagatgaacaataa

SEQ ID NO: 7541 - DNA, 420 bp, Staphylococcus epidermidis
atgaacaataatcaaaaatttaatacaacaaataatttcagagaggaaaatgaaaaaatgaaaaatttaactaatcaagattttaaaaatattgaaggcaaattgaactatgagtatatggtgaatggtaaaaaacatactagtaaaatgattaaattattacaaaaacgtcatgcaaaaaatgtatcagttattaaaagtgaatatccatatttaagtgataatgaaatttcagaaattcttgcagattatcgagaatacgaagatttactatcagcaatagaaactttcatagatttccctaccatttacgaagattctaatattagtaaattcttaacagaagaagatgttgaagatttaaaattggcaatcgaagaaatgacaagttttattgggaagttggaggacgtagaataa

SEQ ID NO: 7542 - DNA, 255 bp, Staphylococcus epidermidis
atgaaactatttaaaaagaagtacgaccataaaaaagtaaatcgtgtgaaagatattgtcttatatacgtcatatgctttcgaggctaaaacttatgatgaagctattgagttattaaaaaataataataaacaaaaagctattgaacttatgtatgaacgattagttgaagcacaaaaacaagaatatgaaatgaaattgcaaatagaaaaagcgtctagtgagaactttggcgaggaatcactaaacgcatag

SEQ ID NO: 7543 - DNA, 870 bp, Staphylococcus epidermidis
ttgagcgtaattcaattagaaaatgatactcaagtgagtgtggtttggtatggaaatgaaaaatcaacttcattcaaaaacttctctcaacctaagtggagtgaattaattagtcgtttatccattccacaaaataatataaataaatatgctagaggaacagcagtatacggtgatctttctaacggtgtagatgataaaggtaatgaatatcgaaaatatagaaataatgacaatgtactttatagagatgtacttgtacttgattatgatgatgaagatgatttaaacatgctacacaagtcaattaaaagcgaattagaaggctttgcatggttttggcatacaacattcagacacacaaatgaaagtcctagaatacgcttgtacgtgccattgagtgagcgtataagtgcaaatgaatatcgtgcatatgtaagaacattagcacaaaaaattgcgtgcaaaattgacgagggcagttatcaaccatctagagctatggcgttaccagtcagaaaaagtaatgaaagtccgtttgaatttcattttaacgatgctgcaatattagataaatcgacacttaaagagtgggccaaattatttgatatttctactcaagaaaattctactcaaaactttaaaagacgtgatccaagccattgggaagaaaaagcctttggcgttagtgaaggtgggcgtaattcttcactagcaagcattttagggcacttatttaatcgtagagtaaatgaacacattatctattcttttgctcagatgtgggggcaatcatgcacgccaccaatgaatgaacgtgaaattaatactactttttattctattatgaaaaaacattacaacaattag

SEQ ID NO: 7544 - DNA, 1710 bp, Staphylococcus epidermidis
atgaattttactaatgatgaaattatgaacgaaattaaagagaatatgaataaaaagacatatactcccgattttatcccagatggttacaaagtgaaacctaatagttatggtgcagcactttatcaagttattccaagtagaaaagatggtgaaccagataaagaaagatttatcactactactattccagaaatcaatactagatatgaaaatattgaaaatggtgaagtgagttataacatgcacttttttgataatagaacaccagtaaatttaaatgttactgccgaagaaatcacagataatagacaacttctcaaattagcaaataggaaactagatgtaacttcaaatacttcatcaaaattagttgattatattaatcaatctaagagatatagtccacctatcaatataaaagtagcaactcgattaggacatgtaaaagattatttcatttatccatataaggacgaaatggaacacaaaaatataaagtttttcaataatgataaaggttttcaaaagttagtcaattcatttaaatctaaaggaacaattgaagattattcaaaaaaagtatttataaaaattaaagatttacctatggttatggtgatgttatatgcctcactaggttcggtattactttatgaatttgatattatgccatttattgttgaacttgctggaagcacttcaacaggtaaaacattcactttaaatttagtggctagtgtgtgggggactactgaccttacaactacatggagttctactagaaacagcattgaggctatggctgcatttttgaactcttttccaatgtttaaagatgatacacgtaatatatcacctaattttatagctaatgcagtctacaactattcaagtggtgaaagtaaaagccgaagtaataagagtttaactattgatgaaaagaaagaatggaaaaatatcatgctttctactggtgaggcctcaattacgaatatggcagaagataaagcaggggtatcggctcgtgtcgttactttagaagagcaaccttatccagataattttgacttcatctcattagattatgaatttagagagaattacggaacgctaggaattgaatttattaaacaatatcaatcaaaaaaagatgagtataaagaaagttttgaaagctatttaagatactttaatgaaaaaggtatcaacgaagtaatgcaacgtattgggaagtgctttgccttattacagcttactggtgaaattcttaatgatatagatggatttgaacatgattactataagattattaaccaagcttatgaaaatatgttgaaaaataataaaacgatagataaacctaaacaaatgcttgaggatatgctgcaatatttagacgctcaccgaaataatgtaactggagatggatatagtcatgtgaaaaatggggagattaaagcagtatataaacgcggttacctatgtattttaggcgatacagtgaaagatatattaggccatgaaatgcatactataacaaaacaatgggataaaaaaggttatttagttaaaaatgaaaaagaccgtctacaaatgaaaattagtcattcaaatattaaacatagagggtttgctataaaaaatgaaatagttaaagaactagggttcgacttttcaagttcaaactatccttattcagattattaa

SEQ ID NO: 7545 - DNA, 522 bp, Staphylococcus epidermidis
atgccaacaattacagaaataggacaccaacaatttaagatgtttataaataataataaatttcagcagcatgtgaaaatggaacaagaaaacatggctaaaggtttgattataagtcttttaactaattctactaaaactcacaaaatctttattcaagaagttattttattaaacaaaaaatattatctctattgttttggtggggatatatcattgataactaaagatttcaaagcactaataaagtttaatattagaaagcctaatccgttacttagtcaatattttaatagtgattggatcattgaaatagataacttaaattcacttaaaaaaggacatggaaaaatgctaataaaagatatattggcaatttctacaaagctcaatcttgaggcttgcttatggactgagaacgataaaaatacaaaatattttgaaagatataattttaaaagtatcggtaaagttggaaaagataacgaaaatttaatgattagaagaaaggaacgtgtatag

SEQ ID NO: 7546 - DNA, 645 bp, Staphylococcus epidermidis
atgaacgttgaaattatagcaaatgaatttgaaactagagcagcaacattattaagatattttactggactgtgtgaaagtagttataaattaccttttgcatttaagatatataacgatccgtttaatgttgtgtatctaatgagcaaagggaagatgtatgctcatgtattgataaaagattgtgaagtgagaaaaacttttgagattgcgtcagaaaagcatactgagaaactaatagagagcattgaggggcattatgcaggttatgaaataccagatggtacacatgacactataagcgatatgatggctagtttcatgtttgataatgagtattttatgtacgggctagaaacctttgcagaaagtaacaatagtgacatgttcgattacatgagtaaagatttcaatatagatgaacttgagggggttcaatctagtaatgcagatgttataggtaatatggaggcattgtatcagttagctactggaattaatgaaccagcaccagagttagttgagggcttgaaaatcattactgagtttatccagaatgagaaggcgaatgaagatgatagtaaggcattgattaagcgactgaatgaattgaaacagtcttattatgatggagtaaaagcgtaa

SEQ ID NO: 7547 - DNA, 333 bp, Staphylococcus epidermidis
atgacaattacaattgaaaaagaattaacgagcgatcacattaaggtattaaatgtgttacgcaatactaagcaagagattattacgaaacaaagtatttttaaccaactaaacatagaatttaataaaaacaacgatagatggttaagaaacacaatccatagcctagttgttgattatggttatccaatcggatacagctataaaaaggactcaaaaggctattttatggttaaatctgatgaacaaaaagaattagctttaagaagtatcaagcgtcatattgagggtagtatgaagcgatatgaggcattaaagaaaatggatatttaa

SEQ ID NO: 7548 - DNA, 378 bp, Staphylococcus epidermidis
gtgggtactactattgaaatttttcaagaacaagtaagcgattatgaattattcactagatttaatacttgctatatacaagaacgaatagcacttatggaaagggatattgaaaatatgtatgatcgcactacacctagtttatgtagcgatactgtatcagaaagtatttactatgagagttattctgttgaaaatctagcaatcgctatattagaggaacgtcaaaaattggaacggtataagaggaaaagtcaaagagatttaaacgctttttataccgttctaggacgtttttcaaagctagaacagaaatatattaaagattattatttatgcacgcttagaatctcatataaacgtgatagagcgttttaa

SEQ ID NO: 7549 - DNA, 393 bp, Staphylococcus epidermidis
gtgatagagcgttttaaaattgaattacatgattatattcaaacaaataggaatgaacgtaataagactatagagagcgattattcatacattagtagcgagcgtcaaaaggatcagagttatcctcataagttaacgctaaaccaagagcaagcactgagagaaaagaaagctgctactacagaaaaagaaatgaataatgatgagtttgtagagaaattgaatcaattagataagaaagcatttaaggaatttatctataatagaaacgaaaataatatcgactttgagaaagttttaatattgctgcaaactatcccgaaaagattaacagatagagaaattaaaaagccatacaactacataagagaaataggcttaaaaactaactga

SEQ ID NO: 7550 - DNA, 588 bp, Staphylococcus epidermidis
gtgaaaactgctaaacactttgatgaatacaatgaatatgtatcaggtcaaagagaaaatattaataaacttgaagatgagcgtcaagagttatcacaacgaattaaagaagataaagagaaatataaagatttaattgccagctcaaaagatgatgaggctgatgcactatattcaacattcgataagaatgagcagaagctcaaagcattacagaaacgcctagagacaaagcaagaagtatttgacgatgcaagacgtaaaaaagctattgagattctcaagcatcagggagagcttcctcacttatatcaagaggacaaagaacgtatattatctaaatttgtgccaattattaaagaatataacaaagtgatagaagaaatcgaagcgttaaacaatgaatatgaagatgagttttacagatatgtaaaattatataatctggaagattttgaagaagataatgaagcaagagacgaaataaaaaattactttagtccaaaccaatacagtaactatgtcggtgctgataagttaccattcattgatacaagaaataaattgagaaatagaggtgctaaataa

SEQ ID NO: 7551 - DNA, 216 bp, Staphylococcus epidermidis; identical to SEQ ID NO: 4384

SEQ ID NO: 7552 - DNA, 570 bp, Staphylococcus epidermidis
atgagcaaattaaatcctagacaagaaaagtttgtggctgagtatttaaagacgctgaatatgacacaaagtgcaattaaagctggctatagtcctcatactgcaagtgaacagggaagtaggctgctaaagaataagaaagtagctaagtatattgatgagcaacgtaagagaattattgacgaaggcgtattatcagcgaatgagctattgcatattcttagtaatgcagcagtaggtgatgagagcgaagtaagagaggtcgtcgttaaacgtggggactttcaacgcaaccccgatactgatagattgaacctcgtatacaatgaacacgtagaaatggttgaagtcccaataaagcctagcgatagattacgtgctagagatatgcttggcaagtatcataaactatttactgagaaaaaagagttcactggtgatactccagtaatcattaatgttggtgaatggaacgaagaagatgaagaaacccaaaagcaaatagatgatatttcaaatcaatatccggacagaccaatattcatagataatgtaccagaagaggattaa

SEQ ID NO: 7553 - DNA, 273 bp, Staphylococcus epidermidis
atgaaagatgagcaagtaaaaatagatgttgatcgcatgatagataaagcactaacctacaaaggcaaacatattgttacgatttgtgacttaatgactgatgatgaagcagaaatattttgtcacatgaatgaatctgaaaaaacaagtgttcacttgccgtttaatataagattagttagaagaaatgtagatagaatcatagtgccttctatcagattaggagacgatagaatattcattaatccttgtgaaaatgataagccatattaa

SEQ ID NO: 7554 - DNA, 729 bp, Staphylococcus epidermidis
atgagtgagaaattcttatatattgatgattctggtcaattgagtaataatggtagacatgaatattttttatatggttgccttttcgcagaagataaaagtgttgttgaagaaattaataataaaataaatgctttttgtagaaaaagacatataaaaggagaaataaaagggaatcatttaaaaatcaaagacagaaaaaaattattgactattttatctgatataaaaggagcacatcagttttttgttatagtaaaaaatgcagaattgaaaagattgaattttcataatccacataatgttaaacggtataaacaatacacaattagaagaattatagaagaaatatttaaaaagaactatttaggaaaagaagatgtagttaacatcaaaattgataatgaagcttttaatagtaaagagggattgaataactttatttattatttaaataggtattggtctaaaccaggtacatttatgtctcaactattttattgggactttatgccgttgatagaaagtaagttcaccataaaatatttagattcaaaacatgataggcttattcaagtagccgatttaattgccaatacaaagtatagaagatttagaggaaatgaaaaatgtggttctgagtttttggaaactgaaacgtgtctaaaactaccagatgatagttattttaatagtcctaaaagtacttctattgctaaaaatatctaa

SEQ ID NO: 7555 - DNA, 615 bp, Staphylococcus epidermidis
atgttaagtaaaattatagaaaaaagcacaattactagtctaactggagcagtcaaatttttaggtggatctataaatgatttaaatttgaaagattatatagcagctcagcatcttctacaaataataaatgaattagaaaaatatcttttaaaattatccattaaagctgatgaaaattgtaaaatcattaaacataatatggattgtaaagacgaaaaagaaaaaagggaacttttaattttagatgaagaaatttatttatacaatatgtatagaaatagacttaaaagcgaagcatatcgaaacttattgtcagtagagaaattcaatgatttaattgatggaaatttagatttgagtttactagttgatagagatagcaatattactagaaaatattacgaaatgaaaacagaaaaatttaaaaattcatatatatccacaatttcccaattagctcgttttcataaatatgaggatgataaaaaaagaattacactgcaaaaaatatatgcttctatatctattatagcaagtacaggtttagtagaaagaatactgttaaaatatttgccattcaagaaagtattcttaagaaatagaataaaataa

SEQ ID NO: 7556 - DNA, 261 bp, Staphylococcus epidermidis; identical to SEQ ID NO: 4078

SEQ ID NO: 7557 - DNA, 255 bp, Staphylococcus epidermidis; identical to SEQ ID NO: 4077

SEQ ID NO: 7558 - DNA, 135 bp, Staphylococcus epidermidis; identical to SEQ ID NO: 4076

SEQ ID NO: 7559 - DNA, 633 bp, Staphylococcus epidermidis
atggacggtttaattacatttatcattatcacattattgattattatagtacctgggccagatttcattattgtaatgaaaaacactattaattcaagtaaaatgaatggttttatggccgcatttggtattactacggggcatattttatactcttcattagctatttttggaattatatacatacttacgagtttacactttgtttttttaacaataaaaatattgggtgcttgttatcttatttatctcggaatcaaaagtattttgagtgcgcacagttctgttgattttagtaaacaagctttagctgatgtcagaaatgtgagttatatcacttcttttagacaaggttttttaagtacaagtcttaaccctaaggctttattattttatgttagtatattcccgcagttcctttctaacggtaatatacatatgaaatctgaagttgcgttatttgctttttcagttgttgtagttatatgcttatggtttttattttgtgtattcatctttcaatatattaaattattattcagcagaccgagattcaaggctatatttgattatattgtagggtttgttttaattggcttatctattaatttattattaagtaaaagtagctaa

SEQ ID NO: 7560 - DNA, 591 bp, Staphylococcus epidermidis
atggaaatttatttagtgaggcatggtgagtcacagtccaattatgataataaacacgggtatctatatttttgtggacagttagacgtccctttgacggaaaggggtataaaaagcgctaaagaactatctgtttattttaaaaataaatacattgacaatgtatatgtatcagatttaaaaagaacaaggcaaacgtatgagaagctatttccttatgatattccaacaatatatacaaagacgttaagagagcgttcgttaggtgtttttgaaggtaaaaataaagaagaagtttgtaaagacaaacggttcgaaaaatatttctgtgatcctaattataaatactttagacatagcttttcgcaaaaagcaccacaaggagaaagttatcaagatgtctatgatagagtggttactttcattgaaaatgagcttaatcaacagcagagacgtgtagtgatagttgcgcaccaagttgtaattagatgttttttcgtctattttaaaatgataactaaggaagaagccttaacgacggaaattcataattgctatccatatttaattaaagaagaaatgaagttttga

SEQ ID NO: 7561 - DNA, 378 bp, Staphylococcus epidermidis; identical to SEQ ID NO: 4073

SEQ ID NO: 7562 - DNA, 624 bp, Staphylococcus epidermidis
atgaaaaagagagtcattacatacttgatactagcgttgtctttaacacttgcagcatgctcaaatacgaacgataacaataatcaagagcatcacagcaacgctcatgcacctaaaaacgctaaaactttaaaggaaaaagatatcttttcttcaaacaaaaagggacaaaaaattagcgaaaaagagatgaagcaagctttagaaaaatatttacaagcgaatagcgatgtacttgataataagtatgtcatgcaacataaattagataaacaaagtgatagtaatcctaaaatcacagaatcacaagctgatcgtcttagcaagttatccaatttagcagttaagaacgatttacatttcaaaaaatttataaaaaacaatcacatccctgaagaatataaagatccaacagatcgcataattaattattttcacgctttaaatagtaccatttcaaatgtagatgaagacattgagaaattaaactaccaaccacaaaattcaattaacgttgttgatgtagccacaaaatattcaggtgatgtaaataaaaaacaacaagataaaattactactttccttaagaaaaaaggaatagacacagaagtatttaataaataa

SEQ ID NO: 7563 - DNA, 117 bp, Staphylococcus epidermidis
atgaatgatatacctgtttcaataggcttttttataataaaaaacagagctccaacatgggaactctgtgaagttaaaatatttatgataaataacgttttaaaaattaatttctaa

SEQ ID NO: 7564 - DNA, 1524 bp, Staphylococcus epidermidis
atgcttaatgctgatttaaagcaacaattacaacaattacttgagcttatggaaggcgacgttgaattcgttgccagcctaggctctgatgataaatcaaacgaactcaaagaattattaaatgagattgctgagatgtcagcacacataacaataactgaaaaatctttaaaacgtacaccaagtttttcagttaatcgccctggtgaagaaacaggtattacctttgctggcatacctttaggccatgaattcaactctttagtattagctatactacaagtgagtggtcgcgcacctaaagaaaagcaatccattattgatcaaactaaagggctcgaaggtccatttcatttcgaaacctttgtaagtcttacttgtcaaaagtgtcctgacgtcgttcaagcattaaacctaatgagtgttattaatcctaacattactcatactatgattgatggcgctgttttccgtgaagaatctgaaaacattatggcagttcctgccgtcttcttagatggtcaagaatttggtaatggacgcatgacagttcaagatattttaactaaattaggaagcacgcaagatgcctctgaattcaacgataaagatccttatgacgtgttaatcgttggtggcggacctgcaagtggtagtgctgcaatttatacagcacgtaaagggctacgtacaggtattgtcgctgatcgaattggtggtcaagttaatgatactgctggtatcgagaacttcatcactgttaaagaaacgacaggttcagagttctcatcaaatcttgcagaacatattgcacaatatgatattgatacaatgactggtattcgtgctacaaatatcgaaaaaacagattcagctattcgcgtaactttagaaaatgatgctgttttagaaagtaaaactgtcatcatttccacaggtgcaagttggcgtaaactaaacatcccaggcgaagaccgtctaatcaataaaggcgtggctttctgccctcactgtgacggacctttatttgaaaataaagatgttgctgtcatcggtggtggtaactctggtgtagaagcagctattgatttagccggcatcgttaaacacgtaacattatttgaatacgcttctgaattaaaagctgatagcgtattacaagaacgtttacgctcactacctaatgttgatattaaaacgagtgctaaaacaacagaagtaattggtgacgattacgttacaggtattagctatgaagatatgactaccggagagtcacaagtagttaatttagatggaatatttgtacagattggattagttcctaatacatcttggttgcaaaatgctgtcgaattaaatgaacgtggcgaggttatgattaatcgcgataacgcaacaaacgttcctggtatctttgcagctggtgacgttaccgatcaaaaaaataagcaaattattatttctatgggtgctggtgctaatgccgcacttaatgcattcgattatataattagaaattaa

SEQ ID NO: 7565 - DNA, 570 bp, Staphylococcus epidermidis; identical to SEQ ID NO: 6910

SEQ ID NO: 7566 - DNA, 780 bp, Staphylococcus epidermidis
atgacactaacaaataaagaagttgctaaagttttatttaaagcttatagatataaaaaacccatcgatttcattagtgagaactatcaattaaacgaagaagaagcatatcatgtacaagaagaactaattgaccaattaactttcaaagaccgttcgactgttacagggtataaagttagtatgactagcaaggcaacgcaagcaattgctaacactaacgaacctgcatatggaacactcttatctaaccaaattgttaatgatggtgcctcagtctctctttcagaattattttcaccattactagaaccagaaattatctttatagtgcaggaagacttaccttatgatgctgatttagaaacaattagatatcatacccgtatcgcgccaggcattgaaattccagatgcaagatataaaaattggtttccaaattttactttatcagatttaatatcagataataccgcaacaggacttgtcgtagtaggtgaccctgtagacggacttgataacgatgcatttgctaatgtacatttaaatttatataaagatgataaatgcattgccacaggagaatcatccgaagtactcggaaatcctttaaacgctattcattggctaattaaaaaactacacacgcacggtaaacaacttaaaaaaggagatatcatttcatctggaacttttatatctccactaaaattagaatatggcacgtaccgtgctgaatatagtggtatcggtaaggtatcattttcggttaataaataa

SEQ ID NO: 7567 - DNA, 756 bp, Staphylococcus epidermidis
gtgtcagattatgtttatgagttgatgaaacaacatcattcagttagaaaatttaagaatcaaccacttggttctgaaacggtagaaaaattagtagaggcgggacagagtgcttctacatccagttatcttcaaacttattctattattggtgttgaagatccaagcattaaagcgcgtttaaaggaagtgtcaggtcagccttatgttttagataatggttatttatttgtatttgttttagattattatcgtcatcatttagtagatgaagttgcggcgtcaaatatggagacatcatatggttctgcagaaggactattagtaggtacaatagatgttgcattagttgcgcaaaacatggcagttgctgccgaagatatggggtatggaattgtttatttagggtcattgcgtaatgatgttgcgcgagtgcgtgaaattttaaatttacctgattatacgtttccgttatttggtatggcagtaggtgaaccttctgatgaagaaaatgggtcacctaaaccgcgcttgccatttaaacatatttttcataaagaccagtatgatgcgaatcagcatcaacaacgtaaagaattggaagcatacgaccaagtagtgagtgaatattataaagaacgtactcacggtgtgcgtacagaaaattggtcacaacaaatagaaacatttctaggacgtaaaacacgcttagatatgttagatgaattgaaaaaagcaggatttattcaaagataa

SEQ ID NO: 7568 - DNA, 1389 bp, Staphylococcus epidermidis; identical to SEQ ID NO: 6913

SEQ ID NO: 7569 - DNA, 903 bp, Staphylococcus epidermidis
atgttaactaaagaatttgctcaacgtgtagaactaagtgaaaagcaggtccgaaaaattgtacaacatttagaggaacgaggctatcaccttagtaaaacagaatatcgtggtcgtgaagccacagactttaaagaagatgacatcgaattatttacagatatcgctaacaaagttaaacaaacaaatagttatgatttagcatttgaagagcttgaaaaggaaaaagactttttacaagtcattgttaaagacgaggatagccaattaccaactgatcaaaatgtagcacaactcgttgaagatttacgttctgaaattcaaaaaatgcgagaagaacgtcaaatgttagggcaaatgattaaccaagttcatcagcaacaacaggaactcaaagaattacaaactgatatcacaacaaaattagattcgaatgctcaatctttaaaatcaatccaaaattctcaagaggctattcagtcagcacaagaacaacaatctaaaaacatcgctaaagctaacgaattaaaagatagtgaattacgtagtcattttgattcaatgtcaaatagcgcttcaatatctcagagcaacgtcgcaagtcaaagtactacagcaagtttgagccaatctgaatcagcaaatgattcaatgagttcatctctgtccgagtctaactcaataacatccgaaagtaatacaaatagcaaatcggaaattgaatcaaaaagtacgtctacaagcgagttcttgtcagaatcaggaagtgtatctaactcagaaaaatctgagtcaatttctcattctcaatcaacatcagctacaccttcttctcaatcgacttaccaacaacaacctaaagaagagaagaaaggtttctttgcacgtctatttaacttataa

SEQ ID NO: 7570 - DNA, 666 bp, Staphylococcus epidermidis
atggaatttaaagtgatagaatcagctaaagatccattatttaacgaggcactcaaattatatgatgataaattggatattggtttagatgaagatagtaaaatttttaaacgctcacttgaaaataataaaacagaaaatgattacgcctttatcgttggaattgaaaaccagactgtagttagcttagcaactgcacattacgaagcaacaaccaattctgcatttttaatttacttaatcgcaaaagaaagccccaatcatgatgaaagaatgtccttaactttagaggcaatagaaaaacaattaaaccttttatcacaagaagttcataatagagatattaatttcatcatgttagaagttccaaaagaaccctcgactgctaacatcgatgacaagctcagaaatgcactagaacatcgtcgtcaattcctctttgaaaatcaatttgaaaagcaggacgacattgactatattcatccaaaccaaaaccaaaaggaaacgccacaaaaagtagatttatttattaaagctaacattgaattaacaaaggacatttatggtacaagtgtcaaatctaattatattcttaaatatgtttttgcaaatggcatttcaagagaaattatttaccctctcctaaaagaaatgaatttaagatag

SEQ ID NO: 7571 - DNA, 408 bp, Staphylococcus epidermidis; identical to SEQ ID NO: 4064

SEQ ID NO: 7572 - DNA, 579 bp, Staphylococcus epidermidis; identical to SEQ ID NO: 6917

SEQ ID NO: 7573 - DNA, 1269 bp, Staphylococcus epidermidis; identical to SEQ ID NO: 6918

SEQ ID NO: 7574 - DNA, 1467 bp, Staphylococcus epidermidis
atgtgggaaaataaatttgctaaagaatctttaacattcgacgacgtgttactcattccagctgcatcagatgttttaccaagcgatgttgacttaagtgtcaaattatcagataagatcaagttaaacattcctgttatctcagcaggtatggatacagtaactgaatcaaaaatggcaattgctatggctcgacaaggcggtttaggtgttattcataagaatatgggcgtcgaagagcaagctgatgaggtacaaaaggttaaacgttcagaaaatggtgttatttctaacccgttcttcttaacaccggaagaaagtgtgtatgaggctgaagcattaatgggtaaataccgtatctctggtgtacccattgtcgataatcaagaggatcgcaagttgattgggattttaacaaatcgtgatttacgttttattgaagatttttcaattaaaatatcagatgtaatgacgaaagataatttaataacagctccagttggtacgactttagatgaagccgaggctattcttcaaaaacataagattgagaaacttccattagtagaaaatggtcgtttagaaggattaatcactattaaagatattgaaaaagtacttgaattcccatatgcagctaaagatgaacatggcagattgttagctgcggcagcaatcggtacgtctaaagatactgaaattcgtgcacaaaaactagttgaagctggcgtagatgcattaattattgatacagctcatggtcattctaaaggcgttattaatcaagttaaacacatcaaggaaacatatcctgaaattactgttgtcgctggtaacgtagcgactgcagaggcaacacgtgctttatttgaagcgggtgccgatgttgttaaagtaggtattggtccaggctcaatttgcacaacacgtgttgttgcaggtgtaggtgtgcctcaaattacagcagtttatgattgtgctacagaagcccgtaagcatggtaaggctattattgctgatggtggtattaagttctcaggtgatattatcaaagcattagctgctggtggtcatgcggttatgttaggtagtttgttagctggtacagaagaaagtcctggtgcaactgaagtattccaaggtagacaatataaagtttatcgcggcatgggatctttaggtgctatggaaaaaggttcaaatgatcgttacttccaagaagataaaacaccaagaaaatttgttcctgaaggtattgaaggtcgtacagcttataaaggaccattacaagatacaatttatcaacttatgggtggcgttagagctggcatgggttatactggttcagaaaacctaaaaaaattacgtgaagaagcacaatttacacgtatgggaccagctggcttagctgaaagtcatcctcataatgttcaaattacgaaagaatcaccaaactattctttctag

SEQ ID NO: 7575 - DNA, 1542 bp, Staphylococcus epidermidis
atggaaatggcgaaagagcaagagctgattcttgttttagactttggtagccaatataaccagttaattacgcgtcgtatccgtgagatgggcgtttatagtgaattacatgatcacgaaatttctattgaagaaattaaacgaatgaatcctaaaggtatcattctttcaggtggtccaaattcagtgtatgaagaggggtcatttaccatcgaccctgaaatttacaatttaggtattccagttttaggtatatgttatggtatgcaattaacgactaagcttttaggtggtaaagttgagcgtgccaatgagcgtgaatatggcaaagctacaattaacgctaaatcagatgaacttttctttggcttaccttctgaacaaacagtatggatgagtcattctgataaagtaattgaaattcctgaaggatttgaagtgattgcagatagtccaagtactaattatgcagctattgaagataaaaaacgtcgcatttacggtgtacaattccatccagaagtacgtcacactgaatatgggaacgacttactaagaaacttcgtccgccgtgtttgtaattgtacaggtgaatggacgatggagaatttcattgaaattgaaattgagaaaatccgtcaacaagtaggtaatcgtaaagtattatgtgcaatgagtggtggagtagattcatccgtagttgctgtacttttacataaggcaatcggcgaccaattaacatgtatttttgtggaccatggtctattacgtaaaggtgaaggtgacatggtcatggagcaattcggtgaaggttttgatatgaatattattcgtgttaatgctcaagaacgcttcatgagtaaactaaaaggtgtgtctgatccagaacgtaaacgtaaaatcattggtaatgagtttgtatatgtctttgatgacgaagctgcgaaattaacagatgtagatttcttagctcaaggtacgttatatacggatgtgattgaatcaggtactaagacagctcaaacaattaaatctcaccataatgtaggtggattacctgaagacatggaatttgaacttattgaaccaatcaatacattattcaaagatgaagtgcgcgcattaggaatagaattaggtatacctgaacacttagtttggagacagccgttcccaggacctggattaggtatccgtgtacttggagaaattactgaagataagcttgaaattgttcgtgaatcagatgcgattttacgtgaagtgattcgtgaggaaggtcttgaaagagatatctggcaatactttacagtacttccaggtattcaatcggtcggtgtcatgggagactaccgtacgtatgatcatactgtaggtattcgtgcggtaacatccatcgatggcatgactagtgactttgctagaattgattgggaagtcttacaaaaaatttcaagtcgaattgtcaatgaggtggaccacgttaatcgcgttgtctatgacattacctctaagccaccaagtacaattgagtgggaatag

SEQ ID NO: 7576 - DNA, 204 bp, Staphylococcus epidermidis; identical to SEQ ID NO: 6921

SEQ ID NO: 7577 - DNA, 189 bp, Staphylococcus epidermidis; identical to SEQ ID NO: 6922

SEQ ID NO: 7578 - DNA, 120 bp, Staphylococcus epidermidis
atgcagcagcatccactggtgcccccaatggtagcgcatgaggtagccgaatatcggggtgaaatagacgacgtagaagctggcaataaagacgatccatgcggcgaaggggccgaatag

SEQ ID NO: 7579 - DNA, 351 bp, Staphylococcus epidermidis
atgaaaaataaaaaaggattaggcataggtcttatcacaattatggttatcgtttgtattgtactagtaatcatgatgttcgtgggtggtaagaaagattcatactacggtattatgaaagatagcacgaccattgataaaatgataaatactaaaaatgaaaaaattgaaaaaaacgtagaattacctaaagatgctaatgtatcagttaaaaaagaagattttgtgatgctctttaaagatgaaaaaactggaaaaattactaaagttaagaaagttgatcacgatgacgtacctcatggtttaatgtcaaaaatccatgatatgggtaatatgaaacacggaatgtag

SEQ ID NO: 7580 - DNA, 423 bp, Staphylococcus epidermidis
ttgaataaacaacaagtgacaaaagcaatagaaaaagtattaaattcttcaaaaattggtgtcctgtcaactgcacatcataataaacctaatagcagatatatggtcttttacaacgatgacttaaacttatatacaaaaacgaatgtcaattcactaaaagtcgaagaaatagaaaataatcctgatgctcacattttattaggttataacgaaacaacaaacaatagctttgttgaaatagatgccactatagaagttgtcaaagatcaaaaagttattgattggttatgggaaactcaagacaaaacatttttcaattcaaaagaagatcctgaattatgtgtactcaaagttatacctcgttcaattaaattaatgaatgatgatgaactagatacgccagctacaattgagttataa

SEQ ID NO: 7581 - DNA, 2034 bp, Staphylococcus epidermidis
atgttttcacttacaaatgacttaaaaatcactattaatggtgaaacaaaagatttaggtaatcatatagctatcattaatcaatctgacatctattttattaatagtgcttcaaatctcgtattactctctattccagttatttatttttatagtaaagataataaattttttaaatgttattttgacagacatttattacaatcaagcagttttgttaaaacaattattttacaagctattcaacatttaataaaaggagaaaatcaagatgagcaatccatctctaaaataatacaaacgctactaaaagaagcagtcattcgatataagaaaaaatatattcctcaaattgcagttaatcattcagtgtttactgaaggattaacatttattcattcaaaagtatcacagtcactctcactacgagaagtagctcaacattgtaatatatctgaatcttattgttctaacctatttgcaagatatcttaatatgaattttaaagattattttacaagcttaaaagtgattgactctataaaaaggctactttcatctgaggactcaattaacgctatttcagaacaatctggatttagtagtcataccaattttacaaatcaatttaaaaattatttaggttgtagcccaaaacaataccgaacgattatctctaagttagaccccttaccttcgataagttttagtgatactgacttttcacaatatattgaattaattaatcaatttgagtttagtgatcattgggctactgaaacgactgaaagagatatcaatgaattttatcctcaagatcagactaaaaactctaaagcgtttatacgttttcaaaatttcaacgaattatttcaatttgtttttaatgaatattacaacattgatcttacctccctgccacaagctgtaatttttatcaatgatatcactgatatttcgacgcgagaggtgaactttaatttattaaatcgatgctttgaaaaattattcgaaaaaaatataggtttagccatgagattaacatctacaaatgaatttgaatctatcaaagaaataattttattatttcttaatagccaccaagattataaaatgaacaaaaaaatggttaaatttatgttagtctttgaaactgagaatatgtcagtgaacgatatacatttatgccatttaaaaattaaaaataaaaataaggctatccgttatagtataactgttgaaggattactacaccaaaattcttctattgatcgaacttatgatatgatgaagcgattaaatttcgattactattttatagacattgaaaatctagaaaccaaaaactcattaattaccaaacgtaaatcgtacttacattcgtccacacactttgaaaattataaacaatttatattagattccggtataccttcaactaaatttgtttacaataatttatctttaaagtgttttaaatatacaaacaatggtacttatccacttcaattatctgaccttgtttgtcatttagtcgcattaatgcgttacgggggtggtgtaagttatcaactgatagaagatgagagtccttttattgccttatttaatcgttatggtagtcccctacctctcatgcacctctataaattaatcgaaccatttttaaatgaacctttagagatagctaacaattttttaatgagtcgcaaagatggtaactatcactttttattatttaataaaataaatgatcgttatctatctgacagtcaacagcgctacgtttttaaaaatacattatcaaccaactcattaattattattaaaacgttaaatcatgagcatggcgcaattcaaaaccttctaccacaaactaaacaacaattttatattgaacgtagtattcttgatgaacttgataaatcaaatcaaccaaaaacagaattagctatacaacatgaccatcatcttccttttcatgtcaccttaaaacacgatgaagtcaaatatatttgttttaaaccttcttaa

SEQ ID NO: 7582 - DNA, 378 bp, Staphylococcus epidermidis; identical to SEQ ID NO: 7125

SEQ ID NO: 7583 - DNA, 1446 bp, Staphylococcus epidermidis
atgagttataaaaaatctgctgaagaaatacttaaagcaattggcggtgaagaaaatttagatgcaatggcacattgtgcaactcgattacgtttagtattgaacgatgagagtaaagtagatgaagataccttgtctaatatggacgtcgtcaaaggaacattctctacaggtggtcaataccaaattattataggttcagggacagtaaataaagtatttaatgaattagaaaaaataactggaaaagaagcatctacgacttcagaagttaaagataaatcatctaagcatatgaatccattccaaaaatttgtgaaaatgttatctgatatctttgttcctattattccggctattgtagctggtggtttgttaatgggattaaataatattttcacagctaaagatttgttctatgatggtaaatctatcatagatgtacatagtcaattttctggcttggctgatatgattaatatatttgcaaatgcaccttttacattattaccaatacttattggttttagtgcagctaagcgatttggtggtaatccttatttaggtgcagctctaggtatgatacttgttcatcctggattgatgagtgcatatgattttccaaaagctttagaagaaggaaaagctattccacactgggatgtctttgggctacatattaatgaagtaggttatcagggacaagtattacctatgctcgtagcaacatatattttagctacgattgaaaaatggttacgtaaagttattccaactgtgttagataatttattgacgccattattatcaatttttattacagcatttataacatttttatttgtagggcctgtcactcgtcaattaggttattggttatctgatggattgacttggttatatgaatttggtggagctattggtggacttatatttggtttattatatgcgccaatcgtcattacaggaatgcaccatagctttattgcagttgaaacgacattaattgctgatgcgactaaaacaggtggttcatttatcttcccaatcgcaacgatgtcaaatattgcacaaggtggtgcagctttagctgcattctttatcattaagcaaaataaaaaattaaaaggtgttgcttccgcggcgggtatttcagctttactaggaattacagaaccagcaatgtttggtgtcaatcttaaattgagatatccatttataggtgctgttgcaggatcaggtataggtgcggcttatatttcattcttcaaagtaaaagcgatagcgcttggtacagctggattacctggatttatatctataaatcctacacacgctggttggttacattacttaataggaatgctaattgcatttgttgtttcagttgtcgtcactttagtactttctcgaagaaaaacaaataagacagctgttgaatcatag

SEQ ID NO: 7584 - DNA, 948 bp, Staphylococcus epidermidis; identical to SEQ ID NO: 7123

SEQ ID NO: 7585 - DNA, 402 bp, Staphylococcus epidermidis
ttggttttaaaaataatgtctaaacatagtgctacgttagttattatgtttttaataactttattgcctatttttcaatatcaagcttctgcacatgcgactttagaaaaatcaacaccacaacagcaaggggttattaaagacaaaccagaagcaatcaagttagagtttaatgaacctgtgaacaccaaatactcgagtgtgaccttatttgatgataaaggtaaaaagattaaagaccttaaaccaataacaactggatggtctcagacagttgtattttcatctgagcaaattgttaatggcacgaatactattgaatggcatacggtatctgcggatggacatgaagtcggagatacgtttgaattttcagttggaaaagtgaggctaaagatgtag

SEQ ID NO: 7586 - DNA, 198 bp, Staphylococcus epidermidis
atggctatgtcagtactcgtgagtcttgtggtttatatgatgacactcacatctgatatattagaagatattctatcatttaaattagaagtgataatgcaatttccgtatatattaagctctatttcactaatcattttgtttatacttttcattttaaaagatatggaaaaatatggtactggctcatttcaataa

SEQ ID NO: 7587 - DNA, 456 bp, Staphylococcus epidermidis
atgattgctgtgataagtatgtctggacacgtgtggtcacaacaagtgccattatggtcaattatcataagaacaattcatcttatagggctaacgttatggttaggttcactcgtttatctcatttgttatgctattaaagtgaaaattaatcagttgacgagtgtaagacgtatgcttttaaaagttaatatcattgctgtgtttatgctcgtttttacagggattttaatggctattgatgaaacgaatactttaacactttggaataatgtgagcgcttggtctatttatcttgtcataaaaatcgcaggaattattactatgatgctattaggtttctatcaaacgatgcgtgctttgagacaacgacaacaggtccatcgttttgcactgatgactgaattgttaattggtatgatattaatttttgcaggtatcatgatgagcaaataa

SEQ ID NO: 7588 - DNA, 270 bp, Staphylococcus epidermidis; identical to SEQ ID NO: 7121

SEQ ID NO: 7589 - DNA, 264 bp, Staphylococcus epidermidis
gtggctaatcctaaaaaggaaggcacattcaaatggaacgctactcaaacttatgataatggagatgttgttaagtggactgggaaggaagatagtgcgcaccctacaccaactacaactgtaaaaaaaggtgcaaatccaaatgacactcattctgactcgagtcaaggtgattcaatcgttttatggatagttgctatcgtagcaattgtgatttcgttgattgctctttttaaacaagcgcatccaaaaaaatttaattga

SEQ ID NO: 7590 - DNA, 417 bp, Staphylococcus epidermidis
atgcgtagattattatactcttttttattttatatggtcataggtttattaagtggcttttactacagagaattaactaaagcgcatgactttgtgggtgacacgcaattgtctttagtgcatacacatacacttatcttaggcatgtttatgtttttactcttattaccacttgaaaaagtatttaaattaagtagttattacttatttaattggttctttttcgtgtatcatttaggtgtgttaatcacgatttcaatgatgacagttaaaggtacattccaagttattggtaaaaaattttcacccgaaatgtttgcgggatttgcaggcataggtcatacaggtatgcttgcaggtttactgttactttttttcttattaagacaggctattcttacagaacccaaaaaataa

SEQ ID NO: 7591 - DNA, 402 bp, Staphylococcus epidermidis
atgactaagattcactttgaagcacccagtcccgaagattactgtaatttaagagctaatgctggaatgagtagtaaatcgattgaagcggcaataaaggggcttcctcatgcatgttttaatgtgaccctttatgagaatgatatgttgattggtatggggcgagtgattggggatggtggtacagttttccaaatcgtcgatattgctgtgaaagatatatatcaaggtttgggtcatggaatggcaattatgcatgaaataatgaagtatattgagagtgttgctgaagaaggtacatatgtgagcttgatagcagattatccggcagatcaattatacgagaagtttggatttaaaagtactgagccttattcaaaaggtatgtatatcaaatattaa

SEQ ID NO: 7592 - DNA, 993 bp, Staphylococcus epidermidis
atggtagaaaaattcaaagcttttgtagtcgatcaagatgacaacggtattgtttcaaatagttataaagaactaactaaagatgacttacctgagggtgacgttttaataaaagtacattattctggcataaattataaagacgcactagccactcaggaccataacaaaatagtaaaacaatatccgatggtccctggtatagatttagcaggtaccattgaagaaacaaatgctccaggctttgaggttggagataaagtcatcgtaacaagctatgatttaggtgtaagtcattacggaggcttcagtgaatacgcacgtgttaaatcagaatgggtgattgaattacctgaagatttaacattggaagaagctatgatttacggtactgctggctatacagcaggtttagctatagaacaacttgaaaaatcaggtatgtctattgaaggtaaagaagtgcttgtacgaggtaccactggaggcgtcggaacgatttcattactcatgttaaataacttagggtatgatgttattgcaagtacgggtagagatgacgccgaagaaaaacttaaaaagcttggtgctaaagaagtaattggccgtttaccagaagataatagtaaaccattagagaagagaacatggcaggcagccattgatccagttggtggtgaaaacttaccgtacatcgtcaaacgattggataacaacggaagtgttgcattaattggcatgactggtggtaacaattttgaaacaaccgtctttcctttcattttaagaggagcaagtataattggtatcgattcagtatttactccaattaaactaagaaaacgtgtttggagaagacttgcaaaagacttaaaaccacaacaattacatgacatcaaacatgttatttcattcgatgaaatcccaaaagcaatcgatcaagtcatcaatcataataatactggacgtattgtcattgatttcaatgtttaa

SEQ ID NO: 7593 - DNA, 540 bp, Staphylococcus epidermidis
atgggggaaaggataagaagtgttcaaataactgaggtagagcaactacaactaattgctaaaagaacattttttacaacgtttagagaatcttatagtgatgaggacttcaagcaattttttagtgatgcatatgatatagatgtgttgagaaaagaattggaacaaagtaattcttttcattatttttatgaagttgatcaaaatatagtaggtttcttgaaattgaacattaatgatgctcagactgaaaacaaaggtcatgcatatttggaaatacaacgcatttactttgatgaagcatttcaagggagtggaagaggacaattatttatcaatctagctattgatcaagctatcaaatttgggaaatcgaaaatatggcttggtgtttgggagcataatcctaaagcgcttagcttttataaaaacagaggatttagagttacagggtcgcatcaattttatactggaagtgtagtagataatgatttgattatggagttggatcttacaacaaactataaacaaagtttatag

SEQ ID NO: 7594 - DNA, 2166 bp, Staphylococcus epidermidis
atgaataaactgacaattattgtcacgtattataatgcggaggaatacatcacaggttgcttagagagtattaagcaacaacgtacacaagattttaatttgattattgtgaatgatgggtcgacagaccaaagtaaaaaattaatggatgaagctattaaagactatgataaaaacattcgatttatcgatttagatgaaaatagtggtcatgcacatgcgcgtaatattgcattagaagaagtggaaacaccttactttatgtttttagatgcagatgatgaattagcttcttatgcaatcacgttttacttagaaaagtttaataatactgatggtttaattgctccaatacattcttttactacacaacgtccgcaatttgttgatttagatcgagtaagggttgaatactttaatgccaaagggaatattaattcatttttaagaaaacagtcagcttgtaacattatttttagaacagctattgtcagggcgcatcatattcgatttaatgaaaatttaaatacatatgtggattggtcatttgttcttgaatatatgaagtatgtaaataagtttgtacgtatttttaacttcccattttatttccgtggggaagtctatgatccatttgaaacacttacattaagtgaacaaaattttgatattttatttaaagattacgtcaacagcttttatgatgccattaaacgagcaacaaatccaaaagttagagaatttattgtcactaaaatgggaaataaaattgctaatgaatttgaaccaactcgatatgatattaatgaacgctatcaaacacataaggatacgcttgttgaattatcgaaatttttacatgtccatttagttaaaaaccaaaagctaataaataaaattgaaacaattttgttaatgaataatgaaactgataaagcttttaaagttaatcaatttagaaaaacgttgcgacatgttaaaaatattgttctaagaagaaaaaataaagaacgttcattgtatgatttaacagataaagaagataatgttaaaccgaaaacgattgtctttgaatcgttcggtggtaagaattacagtgatagtccaaagtatatttatgaatatatgcaaaagtattatcctaattatcgctatatatggtcatttaagaatcccgataaaaatgtcgtaccgggtagtgctgaaaaggttaagcgtaattcagcagagtattatcaagcatactcggaagcaagtcattgggtatcaaatgcgcgtacaccactttatttaaataaaaaagaaaatcaaacgtacattcaaacttggcacggtacaccattaaaacgtttagcgaatgatatgaaagtggtacgtatgccggggactacgacaccaaagtataagcgtaattttaatcgtgaaacatcacgttgggattatttaatttcgccaaatagatattcaactgaaatatttagaagtgctttttggatggatgaagaaagaatattagagataggttatcctagaaatgatgtattagttaatagagccaatgatcaagagtatttagatgaaattagaactcacttaaatttacctagtgataaaaaggttattatgtatgctccgacatggagagacgatgaatttgtgagtaaaggaaaatatttgtttgaattaaaaattgatttagacaacctttataaagaactcggagatgattatgtgattttattacgcatgcattatctcatttctaacgcacttgatttatctggttatgaaaattttgcaattgatgtttcaaactataatgacgtctctgaattatttttaataagtgattgtttaattacagactattcatcagtaatgtttgattatggtattttaaaacgccctcaatttttctttgcatatgatatagacaaatatgataagggattacgaggattctatatgaattatatggaagatttaccaggacctatttatacagaaccatatggcctagctaaagaactaaagaatttagataaagtgcaacagcaatatcaagaaaaaatagatgcattttatgatagattttgctctgtagataatggtaaggcgtctcaatatattggggatttaattcataaggatatcaaggaacaatga

SEQ ID NO: 7595 - DNA, 648 bp, Staphylococcus epidermidis
atgaaaaaagtattagcaagtgcaacgattttatcattaatgttagtaggttgttccaatggtggaaatgatgaagcaagtcataaagatgatagttctaaaacagaacaaaaggataaatcatcatctcaacatgactcaaaaaaagattcgaaacgtaatgatacaaataataagcaagacaatcaggaaaataacaataataaagaacaaacaagtaatcaaaatccaaatgatggagaacaacgaacaagcgaaagaccaacaacaaattcaaacagaaattcatcggataatcaaaataaacaacagcaatcagtacaagataaccagaataaatatgtagcaccataccaaagtgaaaatgcgacacgtgttgctcgatatctttctccatttgagggcgaccgcagtcaagctttgcaacaattaccaaattttgaaactgcactttccattgctaaaaacgaagctaatatgtatggaagcgaaaataaatcatataatgattattcaatagaacaaacagaagatggatttagatatgtgtttagctttaaagatccatcaaaaagtaatacttactcaattgtaacgcttaatcgacaaggtcaacctactgttgtagatcctaacttccaaccttag

SEQ ID NO: 7596 - DNA, 1680 bp, Staphylococcus epidermidis
atgataaagcaaataaatatttcaaatatggacaaattaaaagagcaaatggaacgtgcacttagcgacggctatacgcatgtcatcccctattcaaatgaaattcaaattcatcagtccatgattaaagctatcactttacctaagacttcatttatagttgactatacaattaacaattattatttaaacgattgtaaatacttcgggttggactttgttgattttgaggactgggttaaaaatattaatttatatccaaatgttatttatgaaattaattcaacattagaacttattgataaatttgaagttgaaaatatctttgatttagcattattaacaattcttaaagggcatatcgcagttgaaggtcatgtcgtattagactttaaaggaccattaaaaacgagcaagggattttggcgctcatttgaccgtaatgatttaacttatagagataaattcttcttaaacaccatcgcttatgcacataaacaaagaatcccatttacgcgtgtaccatttaacgatcacgatagtattagatattatgattcagtactacttagtactaaatttaaagctccaagatggttagtgactcctattaagaattattcagttaaaaaacataaagagattagctatatttataaaaaggattcatcaaaacttaagaaccacgtcgtttttctaggatttgattttggctatcgaggtaactctaagtatttatttaattactttgttaaacacaatcctatgatagagtcttactttataacagatgagagaacaggaccacattttatttcaactaacgatgaaaatgtgaagaatttgattgaaacagctacttttgtcattacggaaagctatattcctgacgacattcaccctaatggtaaaatcattcaattatggcatgggacacctattaaaaaactatttttagatagtaaagagccacaccaaaatttaaatatatataactaccgagctcgaaaatataataaatggacacaacaagattatttaattgtggattcagaagaatcaaaaacatactttgaatcagcgtttcctagtcaaaaaattgatatattacctgtaggatatcctagaaataattatttattaaatcgtatcaatgatgtaggtttacataaacgtatatttagtgagataaatatagatcctactaagcgagtattattatatgccccaacatggaaaacaaattcatctgatgatgatatatttcctattaatgaacagttattaaaacattataatgtgatctataaaggacacgtcgagagtaaaaatgacttggttcctgaaggcgtaataaatccgcctaataatattgaaacgcaagacttaattattatttcagatgttgttttaacagactactcatcaattatttttgatgctttaaccgtagataaaaaaggttgcttatacacacccaatcactctcaatatgtcgaagaacgtggcgtctatcaagacgtaatggacaccttaaaacctatttggtataccgatgctgaactattaataaatgatttaattactgatagcatcccacaattaaacaataaatatacaaataaaaataatcagtcatttgaatatattagtaaacttatttcaaatcaattgaaataa

SEQ ID NO: 7597 - DNA, 1602 bp, Staphylococcus epidermidis
atgttagtagaatcttttaatccatttggtaatttactattatcatctttaattgcggcaatccctatcattttatttttactgtgtcttacagtatttaaaatgaaaggaatttatgctgctatcacaacccttgtggttacattattaattgcaattccattctttaaattaccagtaggaattgcctctggagcagttgttgaaggtttcttccaaggtatcttcccaatcggatatattgttattatggcagtattattatataagattactttgaaatcggggcaattcgcaactattcaagacagtattacaagtatttcacaagaccaaagaattcagcttcttttaattggtttttcatttaatgcattcttagaaggcgctgcaggatttggtgttccaattgcaatttgtgcacttttattagcgcaacttggctttagaccattacaagcagctatgttatgtttagtagctaacgctgcatctggtgcattcggtgcaattggtattccggttggtgttgtagatacacttaacttacctggtcatgtagaagcgatgggagtttcacaaacatcaacattaactttagcaattattaacttctttattcctttcttacttatctttatcgtagatggtttcaaaggaattaaagaaactttaccttcaattcttgttgtttctgtcacttatacagttttacaaggattacttacagtgtttaatggtcctgaattagctgatatcattccatcacttgcttctatgttagcattagctttattctctaagaaattccaacctaagaatatctttagagttcaaaaagatgttaaaccagaagcaccgaaaaaacttaaaggtaaagaagtcttatttgcttggagtccattcattatcttaactgtcattgttatgatttggagtgcaccttcatttaaagcattatttgcaccaaaaggtaaattatctgctttagttgctaactttgacttacctggtactttcagtaatatttcacacaaaccaattactttatcattaaacttaattggtcaaacaggtacagcaatcctaattacaattattattactgttttaatggctaaaaaagttaactttggtgatgctggtcgtttatttgttgaagcatttaaagaattatggttaccaatcataacaatttgtttcatcttagcaatttcaaaaatcacaacatatggtggtttaagtaatgctatgggacaaggcatctcaaaagcaggaagcgtattcccaatattatcaccaatccttggttggatcggcgtatttatgactggttcagttgttaataacaactctttattcgcgccaattcaagcttctgtagcacaacaaattggtacaagtggttcactacttgtagcttcaaatacagcaggtggggttgcggcgaaacttatttctccacaatctattgccattgcaacagcagctgttaaaaaagtaggtaaagaatctgaactacttaaaatgacattacgttatagtattggattacttgtatttatctgtatctggacatttatcttgtcattcattctgtaa

SEQ ID NO: 7598 - DNA, 1146 bp, Staphylococcus epidermidis
atgaagtcgttcacattttttatgcataatatttatgcaatgggcggaacggtaaagtcggtgacacaacttgcaaatacactggcagaaaaaggacatcctgtaacaattatttcagtttttagaggcgcagactctccatattttgaattacattcagcaataaaagttaaagtcttagtggactatcgcttaaaacttaaaaatactagagctattacggcaaatcgtatcaaaaagtataccccctttttaaatacaaaagtgatttctcaatttgagccaggtaaaagtcagttttcgagttatgtagagaaaaaaatgattaaagcaatcaggcatactaaaactgatgtactcgttggaacaagagctagctttaatattctcatttctaaatatgctaaagctgaaatagtgaccatcgcaatggaacatatgaattttgatgctcaccctgatcagtatcaaaaggaaattattgctgcgtaccgtaatatcaataagattacaacgttaactgtcgcagaccagcaaaaatatcaatcacaacttaaaactcctgtatacgttatacctaatatggttaccgaaaaaagaattgctgctccaaagaaaaatcgtattattagcgccggacgtttagaatatgaaaaagggtatgatttattattagagagtattcgtttaatacaagaagacttgcgtcaattgaattatgacgttcacatctatggttctggtagtaagaaaacatcacttgttgactttattaatcaatatcatttaaatgatttgattaaaatatatgagccaacgcaagaattaaataataaacttgcacaaagtaaaatcgttgttgtaccttcacgcaatgaaggtttcggaatgattattttagaggcaatggtgcaagataatatagtaataagttttgaaggcaatgtagggccagattcaatcattaacaacggagataatggttatttagtaaactatgaaaatgtgtctgaacttgcaaaacgtatcgatttaacaacacaacattataatgagttggatcacatcattgaaaatagtaaagatacgttgaaacaatttagtccagatcatatatatcaattatttatgtctatgtttaaataa

SEQ ID NO: 7599 - DNA, 1479 bp, Staphylococcus epidermidis
atgaatactcaacatagcaaaacagatgtcatcttaataggtggcggaattatgagcgcaacattaggaactttactaaaagaattaacaccagaaaaagatatccaattgttcgaaagattgagtcaacctggcgaagaaagttcaaatgtttggaataatgcgggaacaggtcattcagcattgtgtgaattgaactatacgaaagaaggtaaagatggttcagtagatattactaaagcaattcatatcaacgagcaatttcaattatctaaacagttttgggcttatttaatacgtgaaggtcatattgaaagtccagataaatttattcaatcagtgccacatatgagctttgttaaaggggaagaaaatgttaaatttttaaaaagtcgagtggcgagtttacagaaaaatgtattatttgaaaaaatgaaaatttctcaagatccagaaaaaattaactcatgggttcctttaatgatggaaggacgccaatcagatgaagcaattgccatcacgtatgacgagacaggtacagatgttaactttggtgctttgactaaaaagttaatagctaatttacaacaaaaaaatgttggcattaattataaacatgaagttttagatataaaaaaattaaataatggtaactggcaagttgtggttaaagatttaaatacatcaaatgtaatgaattatgaatctaagttcgtcttcatcggagctggtggtgcaagtttacctttattacaaaaaacaaagattaaggaatctaaacacattggtggtttcccagtaagtggcttatttttacgatgtaaaaatccagatgtcatacatagacatcatgcaaaagtctacggtaaagccgaggttggtgcacctccaatgtcagttccacatttagatacacgatttgttaatggtgaaaaatcattactatttggaccttttgcagggttttcgccaaaattcttaaaaaacggttcatatttagatttagttaaatctgtgaaacccaataatatgattacaatgttaagtgctggcgtaaaagaatttaatttgacgaaatatttagtttctcaattaatgctttcaaatgaagaacggatcaatgatttgcgtgtattcttaccagaagcgaaagatgaagattgggaagtaattactgcaggtcaacgtgttcaagtaattaaagatacagataagtctaaaggtcaattacaatttggtacggaagtgataacatcagaagatggttcacttgctgcattattaggtgcttcacctggtgcttcgactgctgttgatatcatgtttgatgtcttgcaacgttgttacaaatcagagtttaagtcatgggaaccaaaaattaaagaaatggtcccatcatttggtttaaaattgtcagagcatgaagatatgtaccattcaataaacgaagaagtaaaaaaatacttgaatgtaaagtag

SEQ ID NO: 7600 - DNA, 1356 bp, Staphylococcus epidermidis
atgtttaaaacattatattcgagaattgctatatatgcaattacagtcattttgtttagtgcattaatgagttttctttttacgaatatttattatcactttcatttgaaagcttctaatgatgcaaaaattatgcgcacactcaaagaagctcgtgaatatgaaagaacacaaaaacctaaacctctagatacgtatttgaaacatttaggtcaaatgaattatcaaattatgactgtcaacgaacatggaaccaaacatttttatggggaaacttttcgtaaaaatactataagtcagtctgcaatcaaaaaagtgctcaacggtgaagattatcatggtattaaaaataaaccttatgcattttttgtaacagggttcttcgataatgaaacggaaaatacagtaggtattcaatttaaaacagatgatggggcattagcagtttttatgcgcccagatatcggggaaacttttagcgaatttagaattttcttagctgtgttgataacacttttacttattatttcaatttcactagtcattgcatcaacatattctattattaaaccagtgaccgcattaaaaaatgcaacaactcgaattatgaaaggtgatttcagtacgcctatcaaacaaacacgtcacgatgaaatcggaacactgcaatcacgtttcaatacaatgcgtcaaaatttaggacaagtagatcaaatgagacaacattttgtccaaaatgtatctcatgaagttaaaacaccgcttacacatttacaacgattgcttacacaacttgaattgacgcaaaatgaagaagagaaacaactatgtatcaatgaaatgtttgaaatcactaatcaagtaagtgaactaactaaggaattgctacttttatctgaattagataatgcttcccaccttacttttaacgataatgttcatttaaatactttaataaaggatattattagacatgaacaatttcgaactgatgaaaaagatttagttatgtttactgaattagaagatttgtattttcgaggaaatgaaagactattacatcaagctttcaataacctcatcattaatgcaatgaaatatgctcctcaaaatagcatgattaatatcactctaactagtacaaatcacttgattatatttaatattgaaaatgatggatcgattgcagaagaagatgcgaaacatatattcgatcgtttttataaactgagtgacgaatctagtagtaatggtctaggtctagccattacccaatcaatcattcatcttcatcatggtagcattactctcacttcagatgataaaacacaatttattgtaaaactatttatttag

SEQ ID NO: 7601 - DNA, 675 bp, Staphylococcus epidermidis
atgattaattgcttaatcgtagacgatgataaaaagttattgcaatatgtttcaagtcatttagaaagagaaagtattcaaacacatactttcacaagtggagaagcatcactagattttcttgaaaataaaaatgttgatattgcgatagtagatattatgatgagtggaatggatggttttgagctttgtcagactttgaaagatgattatcatattcctgtcataatgttaacagctagagatgcattaagtgataaagaacgtgcatttctaagtgggactgacgattatgtcactaaaccttttgaggttaaagaattattatttagaattaaagctgtcttaagacgatatcaaattaatgctgataacgagttacaacttggcaacttaatattaaatcagtcttatatggaaattactgtgggttcaaaaacgatgaatcttccaaacaaagaatttcagttgttatttttattagcctctaatcctaaacatattttcactcgagatgatattattgaaaaaatttggggcttcgattatgaaggagatgatcgtactgttgatgttcatattaaaagattacgtcaacgtttatctaaattgaaatcatcagtatcaattcaaactgtaagaggtcaaggatatagggtggaccaaaatgtttaa

SEQ ID NO: 7602 - DNA, 1053 bp, Staphylococcus epidermidis
atgaatctagcttggaaagagattaaattttataagttcagatttatattaatcatgttcattatttttctaatggcgattatggttttatttatcagtggacttgctcaaggcttagcacgagaaaatatatcaatatttgatcaaattaaaggtaatcaatttgttgttcaaaaaatgaaagaaccacaattagaaaaatctattctatcacgaagtaaacaagacaatatttcaaaaattattgatgaaaaaccttttaaaatggcaggtaaaactttcaaaatcaatggaaacgaagaaaacgtgatggctataaatagcgtgaaaaatcatcagccaaatttgaaatctggtcattatcctaaaaatggaaatcagatagcaataaatgaaaaactaactgcagaaggtctttatttagacgataaagttaaagtcaaaggtgacgatacaacttataaagttgtaggtatattaaaaaacacgatgtattctcatagtaacattgttatgatggaccaatccaaaatagaacaaagtagtaatgtcgcaacattttatgttacgaaccaattatctaaatcggataaaaataaaataaatcacatcaaaggcgttcaaacagcaactacagacaatataacaagtaatatcgcaagttataaagcagagcaaacaccattggatatgatgattattagtttatatattataactgcaattgtattgagtgcattcttttatgtaatgacgatacaaaagacatctgaaatcggtattttaaaagcaattggtataactacaaagcatttattgacatcgttgattttacaaatttcaatgattacatttataggtgtagctatagcagaagtagtcatttttctcatcagtcaaattttaccagtttcaatgccattccatatagatatgcataatataatcattgtacttgtcgtatttatgatagttggattaatcggtacatcattatcatttattaagttaattaaaattgatcctattgaagctattggaggtggccaataa

SEQ ID NO: 7603 - DNA, 669 bp, Staphylococcus epidermidis
atgggtctagttgttaaagacataagtaaaacatttggtgaaaaaagctcaaaaacagaagtgttaaaagacattaattttgaagtgaaagatggagaattcatcattttaaatggcgcttcaggttcaggaaaaacaaccttattaactattttaggtggtttgttatctcaaacatcaggtgatgtagtatacgaggggaaatccttatttgaacgacatactaataaagcgcacttaagactaaatgatattggttttatctttcaagcctctcatttagttccatacttaaaagttttagaccaacttaccttaataggtaaagaagctggaatgtctagcaaagaagctcaagcaagagctaaagaattattaaaaaaaattggattagaagagcaacttaatagctacccacatatgctttcaggtggacaacaacaacgtgtagcgattatgagagcacttatgaatcatccgaaaattgttttagcagatgaacccacagcaagtcttgatgctagtcgtgctcaagaggttgttgaaatgatcagaaaacaaataaaagctaaccaaatgataggtatcatgattactcatgatgaaagcttgttcaaatacgctgatcgtattgttcaattgtacgatggtaaaataaaaaacagttaa

SEQ ID NO: 7604 - DNA, 957 bp, Staphylococcus epidermidis
atgttactttttttatgttttctaattgaattattacttattgttttattatatacgaagcaatcgtttactcttaatttatttagttttatcttatataccatcattggttttgttatgatgacttatcatatggtaactgtatcaataccatatgatatgtttatcattataattgtagcaatgatactgttattgattaaatatcgttatattttcaagttgcaaacaggacgtttttttattttacaacttagtcatcatttttatactgtggggctatttgctgtgagttatttatatataagtactattcccctaattatcattaatagcttagctttatgggccgctatcattgcatttagtacaatttattcatttatcggatacttatcttggtctacagcttttgaaaatcatcaatattataaacacgtaaagttaattatggtgcttggagctggaattttctctgaagaagtgaccacgcttcttgctgcaagacttgataaagctttatctgtttatcattcacaacggactaaacctatcatcattgtaagtggtggccaaggtcctgacgaaccaatttcagaagcacttgcgatgaaaagataccttatagctcacaacgttccggaaaaccatatatttatggagaatcaatccacgaatacacgaaccaatttcttatactctaaatctatcattcattcgatgatgcctacttcaagtcagatgttgtgtgtaacaagtcaatttcatgttttaagagcgcttaaatttgctaaaaaagctcatctttctttcgatggtattggaagtcgtacaccataccactttttggcacaatctatgattatagactttttgggtttaatgtatcaatataaaacaatacttactatttatttcgctatgttgttttggcttgcaatactacaaaccatataa

SEQ ID NO: 7605 - DNA, 456 bp, Staphylococcus epidermidis
atggtaagaagaatagaagatcacatctcatttttagaaaaatttattaatgatgttaatacattaacggcaaagttacttaaagacttgcaaactgagtatggcatatcagctgagcaatctcatgtgttaaatatgcttagtatagaggcgttaactgtggggcaaattacagagaaacaaggtgttaataaagctgctgttagtcgaagagtcaaaaagttgctcaatgctgaattagttaaattagaaaaacctgattccaatactgaccaacgtcttaaaataattaaattatctaataaaggaaaaaaatatattaaagagagaaaagcgattatgagccatattgctagtgatatgacgagtgactttgacagtaaggaaattgaaaaagttagacaggttttagaaattatcgactatcgtatacaatcttatacttctaaactttga

SEQ ID NO: 7606 - DNA, 1389 bp, Staphylococcus epidermidis
atgagtcaatgcccaaattgtggtcatcaagtgaaagatgatacatcgcaatgtccaaactgtgggcaactattaacaaagaagaaaaaaagaaagattaaagaccaatcatctcaatcgagtaatgagaattctaccaatatacgtcttcgtaaaattgtgccgataggtattagtgtatttatcttaatacttattatcgtgttatttttccttttaagaaattataattcacctaatgcacaagctaagatattagttaatgctgtagataataatgattcacaaaaagttgctacattattgagtactaaaaataaaaaagtagacgatgctgaagcgcaacaatatattaattatgtaaaaaaagaagtaggtattaagaagtatattcgagatatcaataatactgtagataaattgaataaaagtaattcaagcgtggcatcttatatacaaacgaaaagtggacaagatgtacttaagataagtaaaaatggtacaaagtatttaatttttgataatatgagtttcacagctccgactaaaaagccaattattaaacctaaagtagaaactaaatatgaatttagaacaagtggtaaaaagaaaactgtcattgctgaagcaaataaaaatacacctttgggtgaatttattcctggtacatatcatttaccagctaagaaaattacagaaaacggtacattcaatgggcatttaaattttgactttagagaaagccactctgaaaccgtagatgtagctgaagattatgatcaatcatttatcaatatcaaatttaagggtgcgagtaaattaagtgataaatcagaaaaagttcaaatcaatgaccgtacattcacttattctcattctaaagaatttggtccttatccaaaaacaaaagatataacgatttctgcaactggtaaggcaaaaggtaagacgtttagttctgagacgaaaacaattagtgcagacgatttgaaagataatacgaaagttacattggaatttgatagtgataaaataaatagctatgttgagaagaaagaaaaagaagaaaatagtttgaaaaataaattaactgaattttttactggttatgcaacggctatgaattcagcatttaatatgaatgattttaactttatatcgagttattttaaaaagaattcgtctatatacacatcaatgaaaagtaatttccaaaatcgaacgaacgtgactatgatatctccgcaagtgttaagtgttcatcgaaacggacatactgtaagaacaactattcaacatatcgatcatattggtaattatataaataaagattatgaattagaaatagataatgatgatagtaatatgcagttggttaaagaattataa

SEQ ID NO: 7607 - DNA, 1212 bp, Staphylococcus epidermidis
ttgaaaagggtgtatcagtcagaaaatcaatcattactttttattgttattttaggttcattaacagcatttggcccattggctattgatatgtttttacctggactacctaatattagtcatgattttgatatttctgcatctacaactcagcttactatctccttttttatgattggattagcgttaggaaattttttggctggccccatatctgatattactggtagaaaaaaaccattaattttctcactgattatttttactattgcgagtttaggtattatattcgtcacaaatatatggattatgattattttacgatttattcaaggattaactggtggtgcaggtgcagtcatctcaagagccattgctagtgatatgtactcaggtaatgcgctaactaaatttttatcattattaatgcttgtcaatggcattgcgccaattatcgcacctgcgcttggcggtatcattttaaattatgggccatggcgaattgtatttgtaatactaacaatgtttgggattgtcatgttaataggaactttatttaaagttcctgagtcgcttgaaaagagcctaagggaaagtagtaacataggtacgatgctaattaatttcaaagaactttttaaaacaccccgttttgtattacccatgttgatacaaggggtgtcatttgtattactatttacttatatttctgcatctccttttatagttcaaacaatttatggtttaacgccattaaacttcagtattatgtttgcttttataggcgttacactcattatttcaagccaattaaccggaaaacttgttgactatatagatagattactgttgctgagaatcatgtctactatacaagttattggtgttataatcgtatcactaactttactcaaccattggactttttggatactttcttgtggctttgtgattttagtggcaccagttacagggattgcaacgttaggattttcgatagcaatggatgagagtaaaggggccaaaggtagttcttcaagtttgttgggattgtttcaaactttacttggtggcgtcatctctccacttgttggtattaagggagacagtaatgcgataccttatataatcgttatcgttattacagcaataattcttatggttttacagttgattaatgtgaagatatttaaaaaagctaaaattcattga

SEQ ID NO: 7608 - DNA, 552 bp, Staphylococcus epidermidis
atgaaacaacgtgcgaaatataaaataataaaaagtttaatcgaacttttagaatactatccttttgatgaaataaccattaaaatgatatgtgcatatagtggcgtgaatcgctctactttttatgatcattttcaagataaatatcaattactagataagatccaaaattatcatttaaacaaatatatatctttactacaatctttctataacgattttcatcatatcaaaacagatcaaaaaaaattatataaatttttcttattgatagccaaatatattaaacgtaaagaagcgttctacagagcaacacttgtaacatatcctaataaagatattgcattagattacattaacgccactaaaacatgttatgaaaaagtcatgaatagatatgaaacctcaataaataataaacgtatgtttatcatttattcagtcggtggtcaagcaggtgtatttatcgattggttacgtaatggatgcatcgaatctcctcaagaggtcgctcaagttcttttagctaatacaattaaattacaacgataa

SEQ ID NO: 7609 - DNA, 648 bp, Staphylococcus epidermidis
atgaaaaaaatgatattaatcaatgtgattactatcattgtcctagttgttattggtgtgttaggcttttggttctggcataacacaacaagttatgtgacaactgacaatgcaaaagttgatggagatcaaataaaaatctcaagtcctgcatctggacaaattaaatctcttaatgttaagcaaggagacaaacttgataaaggtgataaagtagcagaagttttagcacaaggccaagatgggcaatcaaaagatatgaacatcaaaatgccacaaaaaggtactattgttaaaacagatggtatcgaaggttctatgactcaagcagggaacccaattgcatatgcatataatttagatgatctatatataactgctaatgtagatgaaaaagatatttctgacgtggaaaaaggcaacgacgttgatgtagatatcgacggtcaaaaagcatcaatcaaaggtaaggttgaagaagtaggccaagcgactgcagctagcttttcattgatgccatcatcaaatagcgacggtaactatacgaaagtttctcaggtagtacccgtaaaaatctctttagattctaatccatctaaaaatgttgtcccaggtatgaacgctgaagttaaaattcataaaaattaa

SEQ ID NO: 7610 - DNA, 1977 bp, Staphylococcus epidermidis
atgacagcgaccttcattattatatatattgtagtagcgctcatactcattggttttattaatttctttttaattaagcgtaaaagaaaaaataaagacaaaagagtggaacaacgttcgacaatagattctaagagagaaagcaatcaatctaaatttaaagcaagcgatttagaacaaacaactaagtcaaatactgacccaacgcaatcaaacgatattgaagatgaaaaacgaaaaaatcactttgactcagaaatagataatgcatctcaatctatcaatacagatagtaaagaggatagaaacgcgttaagtcataagaaccaagaggaagatgacgcatcgaacgatgtgttgaaccctatcgatccaaattctactgaaggtagagttaatgaaagaattaaaaatcaagagtctaactttatttttggtaaaggcataactagaggtaaaattttagcggcaatgttatttggtatgtttatcgcgattctaaaccaaactctattaaatgtggcattgcctaaaataaatacagagtttaatatttctgcctcaactggtcaatggttaatgactggttttatgttagtgaacggtatattaatacctattagtgcctttttatttaataaatattcttatagaaaattatttattataggtttaacactatttacattaggttccttagtttgtgcaatctcatttaatttcccaattatgatgagtggacgtgtattacaagccataggcgcaggtatattgatgccgttaggttctaacgttattgttacaattttcccacctgaaaaacgtggtgtggcaatggggacaatgggcattgcaatgatattagcacctgcaatcggtccaacactttcaggttacattgtgcaaaattatgattggaatgtaatgttttacggtatgttctttataggtattattgctatcgtaattggtctattttggtttaagttgtatcaaagtacaacaaatccgaaagcagatattcctggaattatttatagtacgattggattcggttccttattatatggtttctcagaagctggtaataaaggatggggctcaactgagattgtaacaatgtttattgttggtacggttttcattattttctttattttaagagaactaagaatgaaagcgccaatgttgagcttggaagtattaaaatatccaacttatacacttacaactgttatcaatatgattgtgatgatgagtttatacggaggaatgattttacttccattatatttacaaaatcttagaggattttcagcattagactctggattattactattgccaggtgcattagtcatgggagcattaggtccggtggcaggtaaattgttagatacaatcggtattaaaccattagcaatatttggtattggcattatgacatatgcgacatgggaattaagtaaattaaacatggatacaacatatctccatattatgtggatatatattgtgcgttcatttggtatgtcatttgtaatgatgccgattatgactgcaggtatgaacgctttaccaccacgcttaatttctcatggtaatgcgtttgttaatacaatgagacaattagctggttcaattggtacagctattttggttacggtcatgacgacacaacaaacaaatcatctttctgcttttagtgaagagttagataaaacgaatcctgtcattcaagaccatatgcgtgaacttgcccaacagtatggtggtgagtcagcagcaatgaaattattactcgaacatgtcaataaacttgcatctgtagaaggtgtaaatgatgcatttattgttgctacaattattagtgcgattgcactgatattaagcttgttcttacagggcaagaaaaaggctcaattatcagctgaaaaagcaaatgctgaagattatccttcgcaacaagataaataa

SEQ ID NO: 7611 - DNA, 156 bp, Staphylococcus epidermidis
gtggttatttttataaaaaaagacaaactctatattatttcaatagaatttgtctttttcacttatccagaaactttatgtctcggaatcataaacaaaagagatgattctcgtattaaaagaacattaaaatcatctttatttaatacgtggtaa

SEQ ID NO: 7612 - DNA, 633 bp, Staphylococcus epidermidis
atgtctgaaacattacaaaaccaaagacaattcaactctcaatttgaacatcaagagatccatcgtggaaaaaaatatggtaaaaagaaacgctcatgggtaagtctcattattcaagttttcgttttagtattaactgctattactggctatagtatgcttaaacaacctatatttaaaatttcatttgtaaatgaaactataaatttccatcaattaagaaattttcaagatacagttacgcaaatcggtaatttgaatttaggtaatattgatcaattacaacagtctgtcgataatctcatcattatatttaatattttctttgtcctatgtctgattagtttgtttataaccgtaattacaattatttttaatcgcacagcactcaaagtagtcaatatattacttttagctattatgctagtcattacattgtatttcagttatatcatacatacaattgctcagaaaatttccgaatctctaaaacaatattatttaacagtatcaccagaacaagtattaactgaagcagatgcgattcacaatgcactgatactcattggatgtagtattgcgttattgattgtaagtttgtttttccgtaatcgtttaccacgtattaaataa

SEQ ID NO: 7613 - DNA, 900 bp, Staphylococcus epidermidis
atgaaaaatagaatgatgaatcgcgtggttaataaatatatacttcacaatagatcgatattttttagtaatgatgatgaagttaaacattttttagaaaagagaagtatcgaaaatagtaaaaaacatcagcaacctgcgacacttaatgtaaagtcaaatttagataaacttactcttaatgatatgcaagtgtttagatttaattttagacatgagaaaaatcaaaagatactctatctgcatggtggatataatactttgcaaccttctccatttcattggagacttttagataaactaactttaaatacattgcatgaggtcgttttacctatctatccaaagtcaccagattatcactacttagaaacgttcaaagcgattcgtgacgtttataatcaattagttgaagaagttggtgcgaacaacattgttatgatgggggatggttctggtggaggactagcattaagttttgttcaatcacttatcaatgataatcaagaagtgcctagaaagttatttttactttcaccgcttttagatgccactttgactaatcctaatattacgaaaacgttggaagaaaatgatatcttagttagtcgatttggtgttcatcaactcatgaaatcttggacgaatgatttacctttatcagacgcgcgtatatcaccattatacggtactctaaaagggttgccacctatatatatgtatggaggtggcagagaaatattaagcccagacatgcatgcatttactcatgctctagaggaatgtgggaacgatgttgagtttaaagagtatcctaaaatggtgcatgattttcctatctatcccatacgccaatctcacaaggtgttaaaacacatcactaaatcaatcttagagtaa

SEQ ID NO: 7614 - DNA, 390 bp, Staphylococcus epidermidis
atgtctataaaagaaaaattagtaatagagctcatgaatttaaaagacactgtaaaatacgaattgtcagaattaaatgaacaacaatatttgtttatgaacggcccagcacctcagttgatgaagcgtgccatgaaaatgagctatattctaggccaaaaagaagcgattgatcactttctattactcatcgacacttgccatgagaatgtcttactagataactgccaagactatcaaaaacaaattcaacataaacaattctctttacaagaagatattattcaccaaataaatcagtcaaaggaattcgaatcatttttatcaacttattatgtaaataaaggtaaatatgatatcaccagcaaaataaaaacattacttgaataa

SEQ ID NO: 7615 - DNA, 477 bp, Staphylococcus epidermidis
atgaacaagacatttaccgtaacccgaactgtgacagaagatgctatagataataataatcatatgcatgacgcatattataatattatttttagcgaggtcattaataaattcaatgaggttcatggtttatcatggtcagagagagaccgtctacaatatacagtttttactgttgaaacacacactacttttttacatgaattaacacttggtcaagaattcaatatagagctattcctttataattacgatgacaaacgaactcatttctttctgagaatgttaattgataatcaagaagttgttgcaaccaatgaggtcatgatgttaggaatagataggacacaacgtcgtgctgcaccatttccaaaacattatctgaatgctatacaagattatgctcataagcaagaaaaaattgaatggccaccacaattaggccactcaattggaataccatataaaggagaataa

SEQ ID NO: 7616 - DNA, 948 bp, Staphylococcus epidermidis
atgacggtgaccgttagatttcaatctttatcgcaacctcttacattagtttcaaatgtgaaagagattcctaaagatgcaacgattatatggtatgattttgaaaatgccactgatgaagaaaatgagtatttaaaaaatcattttgatttcaattacttagaaatagatgatgctatcaatggtgacccacgagttaaatataaagaatatgacgcgtatcaatatatgatatttcatagtattattaatgatgattactcaccaatctcactaagtgtatttttagaaggtaatgttttagtgacataccatcacaaacattttccatcattaaagcgtgtggctcaatacaatgcagaaaatcatgatagtgaattagattgtgcagacatcgtcattcatattctggattgtatggtggataaatattttaactttgtttatggtattgaagataaagtgtataattttgaagctaagcatgtcgatgaccgctatagtaagagcgttatggaaaatgtctttcaattacgttcggatttaattaaaatcaaacgcgtattatttccgatgcaagaagttgtagatacaatgaaacaagaaggaaatataattaaagatgccaaacatagaatgtatattcaacatattgatgatcatcttattaaacaaagaagtgttattcggacttctcaagaaatgacgaatgagattcgtgaaaattatgaatcattcacctcatttaggatgaatagtataatgcagatacttacgcttgtatctgttatattctcaccactcacttttattgctggtgtatatggaatgaactttgaatttatgcctgagttgaaatggcattatgcttatttcgtgtgcttaactttaatgctaattataacaataatattaatcatattctttaaaaagaaaaaatggttttaa

SEQ ID NO: 7617 - DNA, 1050 bp, Staphylococcus epidermidis; identical to SEQ ID NO: 7093

SEQ ID NO: 7618 - DNA, 1209 bp, Staphylococcus epidermidis; identical to SEQ ID NO: 7092

SEQ ID NO: 7619 - DNA, 321 bp, Staphylococcus epidermidis; identical to SEQ ID NO: 7091

SEQ ID NO: 7620 - DNA, 561 bp, Staphylococcus epidermidis
atgaataaaaatgattatttaaaagaacttaaaaagcatttgaaacatatgaataaagaagaaaaagaagatattttgaatgaatacgatacgcatttttatagcggacagcaagagggaaagtctgaatcagacgtgtgtaaagaattaggtaatccaaaattaataggtaaggaacttacagctacttccagtgtagaaaatgcacatcaaaaagtgtcgttaatgaatatttcatccgcaattgtagcagtaatggggctaagtttgcttaacttttttattgttataataccagcttttttatgcattttgctcgtattaaccttcatcatttttactctagcttcactagctgcaccattgatgttgctcattaaaggaattatggatggttttcattccattatcttatatgacgcatttatgactggtttaatgtttggtgttggactcgtacttgcagtggtgacttactatctcattaagtggctatttgatgtgactatgaaatatctaaaatggaatatctctattgtcaaaggaagtgtacaatcatga

SEQ ID NO: 7621 - DNA, 804 bp, Staphylococcus epidermidis; identical to SEQ ID NO: 7089

SEQ ID NO: 7622 - DNA, 609 bp, Staphylococcus epidermidis; identical to SEQ ID NO: 7088

SEQ ID NO: 7623 - DNA, 474 bp, Staphylococcus epidermidis; identical to SEQ ID NO: 7087

SEQ ID NO: 7624 - DNA, 1611 bp, Staphylococcus epidermidis
atgagttatagtataggaattgattttggaaccgcttctggaagagtgatattagctgacacatccaacggacatatcatatcaagatatgaggaagactatgcgaacggaacttatatgaactcattatatgataaaccgttacctgaaaactacttcttacaaaatgctgacgactatttacaaattcttgaacaaggcgttcaatttgtattagaagatagtaaagttaataaaaacgatgtggttggaattggagtcgactttacaagcagtacaattatctttctcgatgaacaatttgaaccgcttcatcgtcatgaagatttaaagacaaatccacacgcgtacgtaaaattatggaaacatcatggagctcaagatgaggcaaactatatgattcagatgagtaagaataaaaattggttagattattatggctcaagcgtaaatagcgaatggatgataccgaaaatcctggaagttaaacatgaagcaccagaaatacttagaagagcacggtatataatggaagctggagattacatcactagtatactaacaaattcaaatatacgatcaaattgtggtattggttttaaaggtttttgggacaatgaagctggatttaattacgacttcttccatagcgtggatcctgatttacctaaaatcgtcaaagaaaaatgtgaagcgccaatcatatcaattggagaaagtgcaggtcgtttatgtaaagactatcaacaaatatgggggctttctcaagatgtccaggtttcaccttttatcatagatgcacattctggcgtcttaggtgttggggcaatagaagctggagaattcactgcagtcattggtacaagtacttgtcatctcatgctagattcaagacaagtacccatttcttcaataactggctcagttaaaaatgctattatacctggattatatgcctatgaagctggtcaaccagctgtcggtgatttgtttgaatactcaaagaaccaagcacctaaacatattgtagatcaagcaaatgaacatcatatgcctgtgcttaactatttagaggaattagcaagtcacattagaatagaagaacaacatgttgttgttttagattggttgaatggaaatcgtagtatacttagtaatagtcatctaactggaagtatctttggtcttacacttcaaacaccgtatgaaatgattcatcgagcatatattgaagctacagcatttggaacaaaattaattatgaaacaatttgaagataatcatattcctgttcatacagtgtatgcgtctggtggtatcccacaaaagagtaaattactcgttgaaatttatgcaaatgttttaaataaaagggttgtcgtcatagattcatctaatgcttcagcattaggtgcagcgatgttaggtgcaaatgttgggaatgcatatagtacattaaaagaggcggcattatctatgaagcaacctatagcttatatacaagaatctgaaatccaaaaagttcaagcttataaaccactctaccataaatattgtgaactacatgatttattaggtcgtcaatatcctgaattatcatatttgatttaa

SEQ ID NO: 7625 - DNA, 1011 bp, Staphylococcus epidermidis
atgatatctaaagttgaacatcaaagacacggtttagatttaattaaaattgataatgacgatacgaaaattgtatttacaaactatggtgcaagaattgtttcttggaaataccatgataacaatatcgttttagggaatgtagtagaagcggatgaattttattttgaagaaccttttaattttggtgctacgataggtcgctatgcgggtagaattgaaaatgcatcatttaaattagatgatgatacttttcaattagaatcaaatgatggtcaacatcatttgcatgggggcagtcatggattaaatagacgtatttttgattatgaaatagttgatgatattggacaagtaaagattatattcacaacaacgattaaagaagaagaggacaattatcctggagatatgatggtaaaggttattcacacttatgatgccaatcatcgatggtccgtacaatatgaggcaaaatcaacaaaaaaaacagtatttaatccttcaaatcatgtttattttaatttgaatcgtgataacaatgttgtctataaccactgtataaatagttcagcattaaaaatgtatatgttaaataataaacatattgttaaagaggggcaatctcttgatttacatcgattattggatacaaataaagtctatttaaaagatatttttgaaagtgacaatgaaactttgcaacaacaaattaatcattataatggcattgatcatcctttcgaatttggtggaaatgagcttaccattgataattctgaatttgaacttaatattaagactgatatgcctcattttgtaatgtttacgtttaatgatccacaagtttggaacaatgattttaatatttataaggcgcattctggattttccatcgaaactcaatatatgcctaatgatataaatatgtacggcgccaaagctcagtctattttagaggcagatacattatttacatctaaaacaagttttcaaattcatgaaaagtag

SEQ ID NO: 7626 - DNA, 681 bp, Staphylococcus epidermidis
atgattaaagtgaatgccatatctattggcaaaatagaaacattgtcttatggaaactataaaccaatgcaatcagcgttaaacaaaattccttttaaaggtcaaatgtggctcaatcgacttgggttcgtggacgatgaacaagcctatcataaccatggtggtatacataaagcgatatgttgttttagtaaatctaattatcaattatttaaagatgacttagatcaattacctgaatttgcaatgtttggagagaatttgacagttgaacatctagatgaagcagatgtttattttggtaatcagtatcaactaggcgatacaatcatagaagtatcagatatacgagaaccttgttggaaaattcaagctaaatatgcaatacctaatttagttcaaaaaatgtcgcaatctggtaaaactggattttattttagagttataaaagaaggatatgtacatcagagtgataatttaaaactcattaaaaaggcagaatcaaacacacgtctatctgtgaaagacttaaatcatctattctataatgagcgaaataatttaagattaatctatcatgcacttcgaaatccttatctttcacctgatcgaaagaaaaaactacagaaaatgaaaacgcgtgccgaaaatagaaaattcattaaatctgacgataaatag

SEQ ID NO: 7627 - DNA, 693 bp, Staphylococcus epidermidis
atgaaagatgcaaaagagctaaaattgatgaccttagaagatgtacttagtcaaattgaaaatggtatgacaatcggaataggaacagggagcacaattgaattattaattccccaaattgctgaattaattcagcaaaagaattatacaattaccggcgtctgtacttctaataaaacagcatttttagctaaagaattagctatgaatatagttgatgtaaatgatgttgagaaaatcgacttagcaatagatggcgctgatgaagtagacagtgcgcttaaccttattaaaggcggtggtggagccttatttagggaaaaggtcatagatgaaatggctgaccgatttgtcgttgttgtagatgaaagtaaactcgtcaactatttaggagaaacatttgcattaccagttgaagtcgataaatttaattggtaccaagttgccaaaaaaattgagcgtacttatgatattcatgtaagcagaagagttaatgaagatgtaccgtttataaccgacaatggtaattacatattagattgttcattgcaaaatagaattcctgcttatgagctacacgaatttttaattcatttaactggcgttcttgaaacaggatatttcctcgatattgccgatcaagtaatagtaggaacacaagaaggcgtaaaaatattaaataaagaaacttag

SEQ ID NO: 7628 - DNA, 180 bp, Staphylococcus epidermidis
ttgaaagttgttttatatttcatttactttttcgttgcgttttttgttgtagattctttaattagtttggtatttccaattgaatttgatgtgtatacaaatttaattactgcattcatttttgcagtttttatgacaccactattatttgtattaaaacaagacaaaaacaaaaaataa

SEQ ID NO: 7629 - DNA, 1149 bp, Staphylococcus epidermidis
atgaaaaactctagattttctgggttccaatgggctatgatggtctttgtatttttcgttatcacaatggcattgtccgtgatactcagagattttcaagcgactatcggagtgaaacgttttgtctttagtattaaagatttagctcctttcatagctgcaattgtgtgcatattagtatttaagcacagaaaagaacaattagcaggattgaaattttctatcagtttaaaagtgattgagcgtctacttttagcactcattctaccacttatcattttaatgattggcttgtttagctttaatacttatgctgatagtttcatcctattacaaacttcagatttatcagtatcattattaactatattaattggtcatattttaatggcttttgtagtggagtttggtttccgttcttacttacaaaatattcttgaaacaagaatgaacacattttttgcgagtattgtcgttggtcttatttattcagtatttacagctaacacgacatatggtgtagaatacgccggataccatttcttatatacattcatgttttcaatgattattggtgaattaattagagctactaatggtcgtacaatttatattgcaactgcttttcacgcatccatgacttttgctctcgtctttttatttagtgaagaaacaggcgaccttttctcaatgaaagtcatcgcactttctacaacaattgtgggtgtttcatttattattattagtctaatcattcgtgctattgtttataaaacgacgaaacaaagtttagacgaagttgatcctaataattatttatctcatattcaagatgaagaaccaagtcaagaagacgcctcttcaacttcaaatcatgatgtatcatctaaagatgaaacaaagcaacaagatattgataatgacaaacatcaatcaaagaaacctaataagagtgacgatgcacttactacttctaattataaagaagacgcctcttcagttaataaagaaacggatacaactcacaatgataacattaaagatcattcaacttataccgaagatagacactcatctgttgtcaacgatgttaaagatgaaattcacgaagttgaagatcataaagccgacacagataaatcacattaa

SEQ ID NO: 7630 - DNA, 936 bp, Staphylococcus epidermidis
atgtatcaacttgcacaatctaatctatggacaggtcgtttagatagtgaaactgatcctacacaatttagacacttccaaactgttaaattcggtgatttaagtcaattagatttttcggatgaacacaaaggcgtgggcttattaggatatgcaattgataaaggagtagaattaaacaaaggacgtgtaggtgcaaaagaaggtcccaatgccattaagcgagcttttgctggattgccagatttgaatcaatgtgaagagattatagattatggtaatgtagaacacaatcatgagttgctaatagatacacagcgcgaattcgcagatcttgctgctaagtctatcaaacgacataaacaaacatttttacttggtggcggtcatgatatagcatatgcacaatatttagctactcgtaaagtttatcctgagtcgtcaataggtgtgattaatatagatgcgcactttgacacacgcgatgagggttattcaacctctggtactagttttagacagattctagaagaagatgataatgcagattatttagtgttaggtatatctcaaggtggtaatacacaagctttatttaattatgctaaagaaaaagatattcaatttgtatatgcagatgaattactacatcaggtatctccccccattaaagatatgatagaacgttttatccataatcatgatacggttatgttcacaatttgcatggatgtagtagatagtgcatttgcaccaggagtcagtgcaccagctgtcctaggaatatatccacatacagttttcgaacttgctaaacgggtcattccaagtgaaaaagtaaaatctataagtatagctgaaatgaatccgacgtatgattcagatcaaagaactgctaaattagttgctaatttagtacatcattgtttaatttaa

SEQ ID NO: 7631 - DNA, 1119 bp, Staphylococcus epidermidis
atgacaaattattctacttatgtagattggagaagaacgtttcatcaatatcctgaactttcagatgaagaatatgaaactacagaaaagttacgaaaaatactcaaaagttatggtatacgtatactggaggtacctttaaaaacaggtttagtagcagaaattgggcaaggagaggaaatgatagcagtaagaacagatattgatgctttgcctatagaagaacaagtgaagcatgaatttacatcaaagtatcaaggtgcaatgcatgcatgtggtcatgatattcatatggcaagtatattagctactggtattcaactaaaagagattgaagatgaattaaatggacgcgttcgattaatatttcaacctgctgaagaattaggacatggtgcatttgaaatcataaatactggagtacttaaaggagctaaagcagtacttggttttcataattatcccactttaaaagttggtgaatttgctattaaatcgggtgcaattacctctgctgtcgatcgttttgagtttaatgttaaaggtaaaggtgcgcatgctgcaaaacctgagcaaggaaatgatccagtcatcgtcgtaggacaacttatcaatagtttacaaactattgtgagtcgaaatttatcagcttttgatagtgcagttgtaacaatcggtgaaatttcttgtggtaacacatggaatgttatagctgacaaagcttatatacagggcactgttcgttcattcgatgaggatatacgtcattatattgaaaataggatgaaaaatattgctgatggtttaagtcgtgtttttaatgtggatattgatttaacttattcaagactacctggtgcagtagtaaatgatgcacatctaacacaagaagcaatcgaggtcgctaaaaatgttggctatcatgtatcaatgctcgatgaaccggttactattggagaggatttttcaggttatacagaagaataccccggtgttttcgcatttattggctccgacagtaaatatgatttacatcatcctaaatatcatccagatgagcgtattttggaaaaagttcctcaatatttcgttcagctcgttcaacgtttattgacataa

SEQ ID NO: 7632 - DNA, 882 bp, Staphylococcus epidermidis; identical to SEQ ID NO: 7077

SEQ ID NO: 7633 - DNA, 612 bp, Staphylococcus epidermidis
gtgaaaaaaataaaagctgaaacactttcagatatgcaaaattataaattacttagtggaagtattatacctaggccgatagcatttgtaactactcaaaatttaaaaggggatatcaacgcagccccgtttagtttttttaatgtagttaatcatacaccacctatgattgcaattgctgttcaacgtacaaagggaaatagaaaagacacctcaataaatatagaacaatcaggtgagtttgtagtgcatattactgatgaggctattgttaatgatgtgaatgaaactgctgccccgttagaatatggtgttaatgaacttaaaagaacctctctaagtatgattgattcagatttaattaaagttccagcaatcaaagaagcaaaagtaaggtttgagtgtaagcttcatcaaatagtacaattgggcaacaaagataacgggagtgatttgataattggtgaaattgtcgtgtaccatatcgatgaagaagtttattttgaagatagtaaaattgatgcaaatcaattaaatccggtagctaggttagctggaaatgattactctttgttaggtcaaacatttacggttaatcggcctacctcataa

SEQ ID NO: 7634 - DNA, 588 bp, Staphylococcus epidermidis
atgaaagcatatctatataaattcatgccattgctcattttcgtcataggactgattatcttttacgtttttaatgattatcccacattgatacatgtcatagtgattattgcttttataacgaatggattgaaaaatgtatattttgttaataataatattagaaatcatatgatatgggtgagccctaaactcgatcgtatccttggtatgatttcgggcatactatattttggtatttacgtggttggctttataaagcaacagcctttatggatagtgatgcttattctagtatcaacagtgggtactgcggttttattagaaacaaaattacatattacatcacttcaattagaggagacgttatcatctgaacggataaaacgtaaagtaatatcaagacataaagcacaacgtcttaagtgtatattttttactgtgattgttgtagtaatcatttcaatgctcatatcattatatttaaagttgatggttatttttggacttgcagtaacgatttttatcttagcatcaataagtgtggctattttcgaaaaatactttactattattgaaaatatgtaa

SEQ ID NO: 7635 - DNA, 1302 bp, Staphylococcus epidermidis
atgaaagagatgaagaatggcaatgcttgggcattaattcctttattgttatttgtcttactatttctaggtgttggtattatttctggtgattttaccactatgccattaaatgttgctattacaattactgttattgttgccttacttatgaaccgcaaggaaacttttgcaaaaaaagtagaggtatttacaaaaggtgcaggtcactctaatatcattttgatgatgcttatttttatccttgctggagctttttcgacgactgctgaaaaaatgggaggcgtgtcatctacagttaatttaggcttatcacttattcctcaaaatctaataattgttgggctatttattatttgtatgtttgtatcaatttcaatggggacttctgttggcacagttgcagctattgcaccagtaggttttggatttgcacaagcaacagatgtaccagctgcattagccatggcaacagttgttgggggagcgatgtttggtgataatctatctatgatttctgataccactattgcagcagtaagaacacaaaaaacaaaaatgagtgataaatttaaagtcaattttaaaattgtactaccaggtgcgattattacaatcatcattttattctttttaacaaatggtatttctatagatcatactaaaaactatgattataatttaattaaagtcataccatacttattagttttgattcttgcgttagttggtattaatgtaattattgtattaataggaggtactgtattagccggtataattggactgattgatggttcttttggttggaatggccttttaaatgctatttctaaaggtattatcggaatggaagatattgctatgattgcattgcttataggtggtctagtaggaattatccaacataatggtggtattgattggttgcttaattttgtaaggtcaaaagtaaaatcaaagcgtggtgcagaactaggtatagcgagtttagtgagtgcagctgacatttcaacagcaaataatacaatttctattattatggctggaccattagctaaaaatattgctgatgaatatgatgtcgatccaaggaaatcagcaagtatattagatatctttggtgggtgttttcaaggattattaccatacagtccacaagtgatttcagcagcaggtgtagccggaatttccccattcctaatgttacaatatagtatttatccaatattattaggtgtttgtggattagtagcaattattttaagagtacctcgtttaaatcaatcgtcaaagaaataa

SEQ ID NO: 7636 - DNA, 513 bp, Staphylococcus epidermidis
atggcaaaatataatgtggaaaatgaatatgtagaaatcgacattgagagattactcaaatatacaccagaggtcgtttatgaggcatggacaaaaacagatatcttaaaaaaatggtttatgaccactcaacgcacgaataaatcatttgatgcagatattcaagagggaggaaagtatcgcatcattgatagtagaaacggtaaacaaaacatcattgaaggtacatatgaagagttagttttagatgaatatatcaagatgacgattggaatgccaggactaagtgaggaagaggatgtcattgaagtagagttctttgaaagagagaatggcggaactcaaatgttcttttactatcgctcttttgttgaaaaggaaagacgtttaacaacattagaatataagcaaaagaaaaaagaatatcatgattcaacagcacatggatttgaattgatgattgatcaaatgcaaaatgtgatagatgaaattgaggaacagcgtcataactaa

SEQ ID NO: 7637 - DNA, 147 bp, Staphylococcus epidermidis
ttgtcagtagaggttaatgacggggagattaaattcacaaaaaataataaatcaatcatagatgaaattcatgatttttatcgtaatggtggatattacgatgaagaagaaattgattttggaaaatcagtaggttgtgaattatga

SEQ ID NO: 7638 - DNA, 333 bp, Staphylococcus epidermidis; identical to SEQ ID NO: 2692

SEQ ID NO: 7639 - DNA, 147 bp, Staphylococcus epidermidis; identical to SEQ ID NO: 2693

SEQ ID NO: 7640 - DNA, 120 bp, Staphylococcus epidermidis; identical to SEQ ID NO: 2694

SEQ ID NO: 7641 - DNA, 279 bp, Staphylococcus epidermidis; identical to SEQ ID NO: 2695

SEQ ID NO: 7642 - DNA, 384 bp, Staphylococcus epidermidis; identical to SEQ ID NO: 2696

SEQ ID NO: 7643 - DNA, 774 bp, Staphylococcus epidermidis
atgagtgaacaaacgagtcctgctattaatttaatttgtgattttaaagttaggagtttaaagggagaaagttataagaaatttatcaactatattagcacagaaaagaataaaaaaaatgttaaaaaaccagatatagaaaacaatctttttgataagtatcttgattatatgtcaatagataaattaaaaaagaaacaaggatataataaagaaaatgtaaaaaaaagaacaactatgagctttaattctgaacatgaattcatcgaagaaaaagagatgaacagattaaaagataagtttcaagaagcaaataaaaagaatcatgtcatgtatcaagatgttgtatcttttgataatcaatttcttaaagataatcatttatttaatgagtcactagataaattagacgaacctaaaataaaaaaagccactcgtcgaatggttaatcaaatgattaaagataatcaaatggataaagaccatacattttggtgtgcaaatattcattatgacactgataatattcatattcatatagctacttccgaagagaagaatacacgaaaaattataaaagaaggaaaatttaaaggacaatataaaggtaaaagaactcctacaacgcttagaaatatgaaaagtacttttgctaactcaattaaccaagatattggactaatgaaagaatttgatgaattaaaaaaagagatgaaagataatgtcaaagagaaaataaaatacagaaaatataattcttactctttaaaataa

SEQ ID NO: 7644 - DNA, 345 bp, Staphylococcus epidermidis; identical to SEQ ID NO: 2698

SEQ ID NO: 7645 - DNA, 873 bp, Staphylococcus epidermidis; identical to SEQ ID NO: 2699

SEQ ID NO: 7646 - DNA, 750 bp, Staphylococcus epidermidis; identical to SEQ ID NO: 2700

SEQ ID NO: 7647 - DNA, 15522 bp, Staphylococcus epidermidis
atgcaatataacaatttggtggaaggatttgaacatatagtttcgagctggccaaataaagtggctattaagtttaagaataaatatttaacttataatgagttaaataataaagcgaatcaattagcttcttatttaaaaaaaagaaagattgaaaagggagtagaaatcccttttctattaaacagatctgaagatgtaatcattacaatgttagctattctaaaagtaggagcagcctttgttcctttatcaaaagaaactccgaaaagtagacaaaattatatattaaaacagatgaaatctccagtggttattactaagaaggaattattaaatagtgaaaacgaacctacttataatctcaaccaacatataaaaagcgaagatgtagcatatattatttttacttcaggaactactggtgctcccaaaggtgttatggtaagtcatggtaatattttaaactctatttatagccatgctgaggttttagatttaaataaaagtcataaaaattatttgcaatttgcagattacatatttgatgcttctattattgaaatattccctactttattgcatggacatacgttggttataacccctgaaaatgtacgtaaagatttaaatgaactttctaattttatactgaatgaaaacatagattgtgcaattattcctccggccatgttagataaagaagagcttttgtctttgaattatcttttagttgcaggagaaccttctaatacagaaatacttaatagttataaaaaacaaggaacaaaagttattaatggatacgggcctacagaattatctgtgtctgtatctctatatgaatataacatcggcgacacagctacaacaattggattcccacaaaagggtaataaattttatatattgaatgaaaataatgaattaattaagactaatgatgaaattggtgaacttatagtaagtggtaaacaattgtctcaaggttatttgaatgatttagcattaacaaaagaaaaatttgtttatttagactcaataaatgaagtagtatataaaaccggtgatttggtaaaacgaaataatgataaaagttatgaatttatggggaggaaagataaccaggttaaaattagaggatttagaatagaattacatgaaatagaatcgaacttacagaaaattgaagtaattaaacaagtagtgtgccataaaataggaggagatttggttgcattttacactagtgataatgaaattcaaacaaaatatttaagaaaatatttaagaaaaactctccccgaatatatgataccaaatttgttccgaagaataaaaaaaataccattaacatcaaatggaaaaactgacaaaaaaaaattggaaaaaatgatagaaagtagcaaaccacacagacaattagaatattcatctttgaatacaactaaagaaactattaaacgtatattgaatgtagttgaaataccagaagataaaaacttatttgaagttggtttgaattcaattactgctataaaaataggtcaaaaacttaaaataccagcttctattgtttttgagaaaaagaatattaaaggcatagagaattatctcaaaaacaaaagaagttttgagataattaaaaaaagaagtaatggtttagaattatcttatgcacaaaaaaggctcttatttttagatgaaatatacgaaggccttcctgttaataatctttcatgttcaattattttgagctcggatatagacgttgaaagaataaagaatgctataagagatgttatttcacgacatgaggttttaaggactaatataattaatggatgtccttacatagtaaacaaaaatattgatataactaattttgaagttaatgataataacttttttaaaaaagattttaatctttcttgtgagctcccaattagaataaatataaaaaatagtagactatcactttgtgttcaccatatagtattcgatgggctctcgctagaaatatttttaagagaagtaatgaaaatatataatcaaacagatttaccatctttagaaaaacaatattatgatttttctgagtggcataaaagtttaatagctaataaacattatatagagccccaattaaaattttgggaagaaattctatttgaatttgaagagctaaacctaccaattaaacgtaataataaaactaatattgaatctattttacaaaataataaagtggagattaatctatccaaggaaatgaagaaagaaataaaaagtaaggctcttaataataaaactacagaatttatagttttattaaatgcttattttctgacattatctttggttacaaatcaaaatgatataataattggaattcctttttctaatcgacattatcctgttacagaaagcttaattggaaattttgtaaatgttctacctttaagatttaagatccatccagagaaaacggttgaagataacttagaaagtttaacagaagcaatgatagaaacttctaaaaatcaagatgttccttttgaaagaatagtaaaaatgaaagaattaagccaacagtccacaaaaaaagggaacccaattttccaagcaacaatttccagtcaaaattttggacaacatgaactaatgaataataactttttcaattcaattaagatgaatattaattatcctatgacaaatttttatttatctatgtttttggaagaaaatcagattatatttagctattctgatgaggtgttagacgaaagttttgtaaagttattcgcaactaagttttttgaggtgcttagacaaactttgatgtttaatagaagaaatgcagatattatatttgataatcaaagcctcctcaataaaaacgaattaattaatactaaaaatgtacctaaagaaatatataaaagcactattcctcaagaatatgaagctcatgaaagcccttcatctgtattaggagacccaaaaagtagtattaatcacatttcatataaagaaaatattgaaaaaatagttaaacaagtattgtcaaccatcctagatattgaagaagataaagtatcaattaaagataatttcttttctttaggaggcgattccataaaagccataaaaatggcttctttgcttaaaaaaaagggattgaaaatctcgacaaggaaaattgtcgaaagtcaaacaatagaaagtttaattgaaataatacaaatggattcaaactcatatagcattgatacatctgtatcgaacggaaaagttacaccactaccaatccaaaaatggttttttaataaaaatcaccataaccctaattactttaatcagtcatatatattagaagctaataaaagttattcaaataaattagtaaacgacgtttttagagagttgataaagtatcatgatggtttaagaatcattatggattatgaaaataaaagtactgagcaattatctttttctacgtttatagagagtaaattttttctccaaacaaagaaaataaataaaaaagtattatacgaaaatgatattgctgagatttgtaataagttacaaaaagacattaatattgaaaataagtactctattatcgtaaatcagttagtatgcaaggaaaaaacttactttataatagtagttcatcatttagtgatagatgaagtttcttggtctattttaatagaagacttcttcgatttattagaactaccaactagcaaatggtccttacctgagaaaacttcttcaatcaatacttgggcaaaagaaatagaaaaggcaagtaaaattggagaatatgataatgaggtaacttattggaataatattactattgataagtatgagtttctagaattaaaaaaaacaagtaaagataattactattgtaatagtgattccataacattttcgttgactagtgaaaaaaccgaagatttatataaaaaaataagtatgtatccggaatttgatataaatagcgttttattatctgctttaagtaggtcagtaaaaagaacttataataaatgtaaaattaaagttatgatggaaggacatggtaggtataaaaatgtaagtaatttaagtatagacagaactgtagggtggtttacaactttatatccaatagaaattagttgtgagcataatttaatcgaaaaacatattaaagatataaaagtggggatggagatagtacctaacaaaggggaaaattttttatctttattaacttcaaaaaaattaaaagaggattttctgaaccaagaaatattcgaactttcttttaattatttaggtaatattaataataacgttaacaaaaagtacagcgtcttatccattccagatattaaaaatgtcggagactataatcaaaaagctgcattaatagaaattaattgttttacattaaataataaactaagtgtatctgtaaattattcgttaaatattagagataaaagcaaagttaaagaattagtcaatacttttaaatcagaaatagaacgtacatttgagtataggtctttaaaaattgatgataataggaaaaacgattttcaaaaaatagcaagtaaagtgagcaatggagaatttatttctaaattgacaccaatgcaatcgtcaatatttcaagaatatctacgaaaggccactcttacgaataattatactgtacaagtagtatttgaagttactggaaatgtatctttaaaattattaaaggaagctttcaaaaaagtagttgacaataatgaaatatttaaaatgcgttatctttataaaggtttaactgatatctatcaagttttgacaactgaatcaaaggcagatattgatgtgtaccatgaaagtgatgagaatgaaatatgggatatgctaaatgagacttccaaaaaatgttttaaacttgacgaagatgctttgataaaatttagctgttttgtaaaagaggataataaaaaaattatatcttttacttatcatcacattatcatggatgggtggagtattaatgagtttatacaagaatttttgaaagttttaagaggtggagaattaaccaaaaagaaaactgatatcacacgatatgttaataccgttcataattataatatagaacaagtgaaaaattattggaaaaattatttgtatgaatatgaaaatagagctgttattccatcttttaatataggagaaacatatcatactgattttgttaaaataaaaaggtttaaaataattaatataattcacaagatccaaaatcttaaaaaaagtaataatagtttaagcgttaatgatttcatactaggctcctggggtatcgttttacaaaaattaacagattctaaagacgtagtttttggaactattatatcaggtagaaatagtgaaattgttgattttgttaatgtgattggattattaattgaacaagtacctataagagttaaaaataaaaataatacatttttggaaattatagagagagttaaccatgacttatcaactattccgactcataataatttatcaataagtgagataatgagtttagttaattctgttgtgccacaacatagagcaatcatagataattatccagatacttttaaaaagagacagaagatagataatgaaagtaccattgaatttaaaaattattacgagcaaaatagcattgattttggaattgattttactatagaaaataaggatttaattgtagaaatcaaatataataacaaaatttatagtgattatgacatatcaaaagttcaagatatctttaagaaggttattacagagggtacagaaagtcctaatattaaagtcgataaaattagtataatcgaggaagaggaaatgaatttaattacctcttatgaaaagggaccaatctctaaaaagaaaaacaactccatgttagaacaattttctaatattgtgaaaaaaaatcttaattcagtagctgtctcaggtgagaaattttcttggacgtataaagagttagatgactattctaattgtattgctaattcactgttgaaaaagaatgctaatcctaaagatagaatcgctctgaattttaataataaagaattaattttacctagtatattaggagtatggaaaattggagctgtatttgttccgttagatccggaggaatcaaaagaaaaaaatgcttttattatttcaaattcttcgtgcaaatttgtacttacagatttaaatgagaaaaatgattttgacgtacaaagtctcaacatttgtaatttaaaggaagagcataatacatcaaacaacatcgagtattcatgtacggatattgcttatataatttacacctcaggtagtactgggaatcctaaaggagtggaagttggattcagtgctttaactaattatatagagggtatgttagaaaaatctaatccatctgaaatgaaatcatctttagttatgtctaaggttaattatgatttgagttatactgcattgtttattcccctatatattggaggaaacattacctttattgagaaagaagattatggtaattcatataagatttctagattaattgaaaaaaataaagtaacttatatcaaaactactccgtctatattttcgtgtcttgagtataaagctttttcaaattgtgaaacgttaaaattaattatactaggcggagaaacaccaaattccaaaagtatattagaatttttagattttaatcctaatgttaaatttttaaatcattacggcccaactgaagcaacaattggttgtatatctggttacataaacccagattttctaaaaaaagaaaaagaatataatgatattgggactccacatacgaatgtaaagatttatatattaaattcagataaagagagagtccctataggaactaaaggagaaatatatatttctggagcatgtttatctaatggttatttgaataatagaacattgactaatgacaactttatttatagtaaaaaagaaatgttgtataaaacaggtgatatcggtagatttacaccaaatggtaccattgaatattgtggacgcctagatacacaaattaagcacttaggatacagaattgaattaacatcaatagaaagacaaattaaaaaagtagaacacgtacaaaattcaattgttttgcagttagaggagaatctcttaggtacattaatagtactagacaataatggatcattaatcgatgttaagaaaagaatacaagattcacttcctaaaatgatgtggcctgcaatatatttagaagaaagcgaaattccaattactttaaacgggaaggtagattataataaagcgagacttttattaaataaaagaagaagccaaaccccaaaatcaaattataaatatataaattcacctgactataaattgaatgttttctgttatataaaaaatatattggaaaatcaaaatttaaggttgcaagataatttctatgaaacgggaggtaattctttaacagctattaaattattgtctaaactaaaccaaaagtatgataaagatataagactaaaaagtttaataactagtgaaaattttggcgaatttattgataatattttaaatgaagatagcgattctacagttaatgttgaaaagaggaaaagggaagagttttatccaatttcttctcaacaaaaaagaatgttatctcttaatttaataaatacagataacaaagcatataatcttcctattatattagagattgaaggtataattgatatagaaagattcaaagactcggtggcaagagtggttcagaacaatgaaattcttcgtactaaatatgtagttaaaaatagtaatgtatatcagaaagtgttaaaagattttgatataactaaaaaaattattaaaactgataatcttcctcagaaagcagaattaacggaatatattgaaaattttaatctgctcaatgaaataccgattaaatataaagttttttatagtttttcacaacataaaaccatagtgttgtttaactttcatcatatttgtatggataaagtctcgtatgatttgtttttagatcaaataaagagggcttatgaaggagtgaaattaactgattcagagtatcaatataaagactacatagattttcaagaaaagtatttcctagaacataagaacagacttgtaaattattggtataagaagttatcatccttaagcttatctgaaggaacatttagtactttaattttaaattcagataaatttaatggagaaaactacgaattttatttagatgaaaaactcaatgaagaaataaatgtattttgcaaaaaatatcattttacaaaatatgaatttttactttcggcatttgtaataagccttattcgtttacaagataaaaaagaaattggtgtaattagtaattatcttggcagaagtaaagttgacttttacaatactatgggtatgtttaataatactattcctcattttttcaaaatagataatacgaaaaaagtactcgatgcaatgagaaaaataaaacatcaatttattgaggatatcgatcatggagaaatgcaatttgagaagattgttaagatgggaaaagaatgttttaagaaagatgttaattctatatctgatatatcttttttatatgaaacagaaagaacagaattagatattggaaatatgagagccaaacttattaagccaaatttaaaaacatcaaaatttaacatgactttgtcggtattagaaagtgctatgaaactattctgcacgtttgaggtaaaaaaagatgtttattctatagaaatgcttagagaaattgaaaacaaatttaaaaaagttattaatgaaattattagttgtcagggaacagagagaaatgtagaaaggggtaaaaaagatctgtatactaacagtttattagaggattttgaaaaaaatgctagtctatatcctgataaagtttgtctaattgaagagaatgaaaatatcacatttagtaaacttaataataaagctaatggttttaagtattcttttgttaataacattgacgatgataaagttttattattattaccacccaaaaaagaagtatttgtagctattttagctatttggaaagccggaaagacttatatacctgtagatcctaaatacccggatgaatatataaagaatattctttttgatagtaaatctcattttgtaatcactgataaaagtaacaaagaaagacttgaaagattgaagtgcaaagccttattaattgattatgataatattattgaaatcccaaaaggtgaatcagtatacgattttaataaaccggcttatattacttatacgtctggaactactggaaaaccaaaaggtataatgattagtcataagtcactatctaattatatacattggagtcaagaaaactatttaaaaaatcaaataaacactatggcattttattcatcgatttcttttgacttaacagttacttctttatttatgtgtttaactaatggtaataaagttaagatttttaaagaatgtgacagttttaaattattgaaaaaggtattggaagatagagaagttaatatagtcaaactgactccagcacatttaaaaatagtagacagaaccaatattaaattaaataaaaacctccacactttaattgttggaggagaggctttttattacgatttagcaaaaaatatagaatctaagggagccaatattactatttataatgaatatggtccttctgaaactacagtaggagctattgtctacaaatttgatgctaataataaaagaattcaagtgcctatcggaaaaacaatagataatatgcaagctaaaataatggtagatggaagggaagcaaacataggagaagtcggagaaatatatcttggaggtataggcttggcaaatgggtatataagtgattccgaagacagtgatgaaaaatttgtttacattgagggccacggtgatcagaaattttacaaaacaggggatctaggtgccatattagatgatgggaatatagaatatctaggtagacaagattgtcaagtaaacattaatggatatcgagttgaattagaatctattcatcaatctcttatgagtctaccggaagtaattgaagcagtagtattaaaagaagattatcatacgaataatattatatcttatgtagtaatatcgaatgagttgagcaatatcaattcgaattatataacatcacagttaagaaaaatttctcctgaatatatgattcccaactcaatccgaattgtaaaaagtattccgttgactattaatggcaaagtcaatgaaaaaaaattaaaagagtctacacaaaaaaactttaatactcataatggttttgagaataaaacaattaatcaacgaatattattaaaaaaattagagtctattttaaaaaagtcaaacttgtctttatcagataattattttgagttgggcggggactctatacaagctattatccttagttcagaattaaaagacgaaggatttagtttggaagcgtcaaaagttctcaattcattagatttaaatgaaatgagtgaatatataaaaaaagacgaagaagttaactttaataatggagataataatgagctgtacccaattagtcctatacagaattggtttttcaatcaaaaattagaaaaccctaatcaatatgtacagtctttattattaaatatgagttataattataaatatgaagaagttatagacgcattactaaaattaattagaaagcatcctacacttagaactaattttaagcgtataaacaaccaactcgtaagacaatattctaaagatatggacgaaattgaaatatcaaaagttattgaatataaaaaaataaagagtgataaattcttagaagaaattcaacgagtaagcaatgatattatagatgaaattgaaatatttaatggaaaactatggaagatatgttttgttgaagctcatgattcaagaaaagttttatttgtttttcatcatttaataattgacattgtttcatggaaaattttaataaaagatttagaaaaagctttaatgaaaaaaactataactaaaacaacttcgtatctagagtggtcagagttaattaacaacaaaaaacaagcaaataaaaccctagcttgtgctgaaagcatagattgtaatttattaactaaagaaataaaaaatccaaacgaaatattgcattataaagtggaattagatgtaaaagaaagcgatttatcttttttgaataaacagttacatgccacaacttttgaggtaacttttactatcataatcttatctttaacgcatgttctaaaaaaagaaaatatatctgtaataattgaagataatggtagagatataggggatgaagaactaaatattgagaatactattgggtggttcacttcattttattccttagatatacgagttgataatgaaaaagatatagtagaaaatataaaaaaaataaaatatatgttgagaaattcaaagaaaaatgaggttaataaaacaaataacgttgataagcaaggacatataaaagtaaattatttcggagaaatatacaaaaatttaaattcaaatatatttgacattgaaaaaaaatatcaagaagctagttctttaaaaacaagcaaaattaattttcctttggaaataagttgttatttctcatctggcaaattaattatagactttgaacagtttagtgagttgaatgaagttttaagagaatatgagattaaatatagtatacaaaaatattttaatgaaatacttttgtttaaaaatgaacttcataaattgaaagaaattaaacactcaaacaaaggaaacgaaagtataaaattacaccctgtattacctactcaagaaggattatattatgaatggttaaaagataatagttcaagcaaatatatagaacaaaatgtttttacattaaatagagaactagatgttgaagctctaaaaagaggattaaatatacttatagaaaagtatgcagcattacgtacaaattttgattttgataaagaaagtaataagccggttcagttagttagagaaaaagggtatttagattttaatacaaaaatattgaataaaaaaaatattgaattactggtagagatagataagagtgagcctttcgatttgaagaaaggggaattgttcagaattacctacatttctggtatagattgttctgatactatcttatttacctttcatcatttaattttagacggttggagtaagattattttaattaatgagataagaaattatctatcaaatggaaatatgctatatgacagtaatggtgtacaacctggggaatatgcacgttttattgaaaaacagaaaaatgctgaaaacagtaaagttttttggacaaattaccttgcaaattgtaacgctaaaatacattggccttctgagtatcttgataaaagagattgccaaaatataaatgaatattactataaatttgataaggatattcttaagaagattaaagatatggcaattagtaatcagaccacattgagtgtgataattagtactttatggggaatatcaatgtatgattatgtaagtgaaaatgatatagtctttggttttgttacttcaggtagaaataaatatacttatcaaatgtcaaaaagtgtcggtatgtttgccaatactattccgattagaattaaatccgaaaatcatgagacaattaatgaggttattcgaaaagtaaaaactaatatcttaaagtcattagataacgactattactctttaggtgagatattatcgtatagttctattaaaaacattaatcatcttttagttattgaaaatcatgagaaaaatgacaaagagattgattttgccaaaattgaaacaaaatctaaaacggagtttgatttggaagcgttatttggtattaatgaacatcttcatattaaattgagatattatcctaataaagtgtcattatcaactctagaacatataattacaacttttattaatttaatagataagacatctttaaatggagaaattcatatgtcgcaaatagattcactaataaagcaagattataaaaaccgattgtatatgaataagataaatgacagattggattcaaaaaagcagggacagttgcaagaaaatttatcagaaattcttcaaaaaagttttcgagctttttctgaaagaacagcaatcatttctgaagatatacaatgtagctattcttatctagataaagaatctaaccgaatagtacaaatattacgagaaaaaaatattcataaaggagacgtaattggtgttttcttagataaatctattgagttagtagcttctatgattggtattattaaatttggagcagttattctacctattgatgtcaatctcccttcttctagaagagaatttatgataaatgattctaattgttctttaatattgtctaaggatatagatatgaagaatgataataattatgttgaccttaatgattataaaaacataaatgttacaaatagtgagtgggcaatacttgatgacaatgatcttcaatatattatatttacgtcagggaccacaggaaaaccgaaaggtgtaaaaatttcagtcggtaatttaaaaaactttattcatagtagccaatgttctgttgattttagtaaatcaattaatatgatttcaataacatctatttcatttgatatatctatttcagaattattaattcctttaataataggaggcaaaataacaattttaaataataaggattcaaaagatcctcgcaaaattttacaagtgttgaaaaataatgaatgtaatactttacagacgacccctacacgtttagaaagtattttagatagtgtgaaaataaaaaaagaatttgaaagtattgaatatgtatacttaatgggggagactcttaaaaaatctactgttaaaaaacttttcaatttaaaacatgtaaacttatataattgctacggacctgctgaagctactatttggatagccgcaaaaaaaataaataacgaaaaagaagatatatcagttgggaaacctataagaaatgtagaaatgtatatattagataataataataatgtaacttcagaaccttatggtcatttagctgtaagtgggaattcgttatccaaaggctatatcaataataacaaagagaataactcttcctttgtatttataaataattcaattaataaaaaagtctatttaacaggtgatttggccaaatggaatgaacaaggtgaaattgaaatattaggaagaaaagataatcaaattaaagttaatggtgtacgaattgaaacaacagaaatagaagaggttgcaaaaggctacgaaaatataaaaaattcaactgtactagttgataaaactaaacaaaatatgactttatatttgtctttaagtaacaaagatcaatattttgatatttctagttttagaaagtttttaacgaaacatttacttatacaaatgcttcctcaaaaaataaaaatagttagtgaaatacctgttaataacaatgataaagttgatttaaagaaattagaaaaactaaatagcacccaggaaacaaaatatatctttaacgatgtaattgaaaaagacttatccattatttggagtagttttttagagactgatgtattttctaccaacgctagtttttttgatttaggaggcaattcgttaaaagtttataaagttatttcagaaattaacaaatacttcaatattgatatgtcagtaattgatttttttaataatcctactattgatttattatctaaatttataaagaattttaaaaataatcatagagatcatttagaaggattgttcaaaatatatcctaaaatacctgaaaatataaagttgttaaaaactaatgattttaaatatttaatagttagctcatatatacttcttgttagttttatcgaaaagaaaagatcactttcattaaactttcagttaaacaatacagaatttactaaaaacttttctttcataaatatatcagattttgaacatctaattgagatagttaaagaaatatttcaagatgttaataataaaagagcttctgaaaataagcggactaagtggtcaataactgataacttattaaacgtaaaagaagataatgtaagcctctatattagtaataaaaatgaggttattattgtatgtcaaaaaacatcggtagaatataaatatctaaatgaaataaatatattatttgaaaaagttttaaacgaggttaacaattaa

SEQ ID NO: 7648 - DNA, 1272 bp, Staphylococcus epidermidis; identical to SEQ ID NO: 2702

SEQ ID NO: 7649 - DNA, 4359 bp, Staphylococcus epidermidis
atgaatatagataatattatgaagtcgttgtctactcagcaaaataaccacattgctattattggattagattgtactttaagtaattatgaaggtcaggaagaagttcttagtttaataagatataatcgcaatggcataaggacgataccttataatagaaaaaaaatatatgatatttcttttgtcggacaatcttcgcgtaattatataccactaggttatattaatgatatagatgcttttgattataaatttttcaatatgccattagaagaagcaaaacttacagatcctagacaaagattattcttacagtctgcatggagaactattgaagatgcaggatatcggatagataacttaccagacgatactggagtatttttagggctaagcaatgatagaggtaatgagtacgctgagatattgaaatatttagattctcaatccaaacaagtttctactgctggaaacatccaatcaataatagcaagtagaattagctatttattagatttaaaaggaccagctatagttattgactctgcttgttcttcatcgatggtggcgttacatacggctattcagtctattataaatgatgattgctcacaagctatagtgggtggcgttaatttaaaaataaaacctaaattattaaaagaacacgaagttaatgttgggaatgtatctgacagttttttaactagagcttttgatgttaatgctaatggtaccaacagtggagaaggttttggctctatattaattaaaaaattggataaagctattgaaaataaagataacatatattcagttattcttggaagtgctctgaatcaagatgggaaatcaaacggtattacttctccaaacggagaatcacaagaagaagtaataaagaaagcatggaaaaaggcaaaagtacatgctgaagatttttcgtttatagaagcacacggaacaggtacaattatcggcgatcccattgagtttaacgctttaaacaaagtatttaacgaacagacttcaaaaaaacaattttgtgcactaacatcaattaaaagtaatattgggcacacggatagtttttcagggttagctggtataattaaatctgctttatgtttaaagaacggaattataccggcaagtagaaattttgcacaacccaataatagtatagatattctaaatagtagcttatatattaataaaaatacaaaaataaatagaaaatcaaaaaaaatatgtggcgtctcatcgtttagtattaacggaactaatgctcacgtagttatgagtgattttaaattagaagaaaactcgcatccgcctaactgtaaaaaaattcctttattattttcagcagaaaacatatcaattttaattaattatttaagacggttcttaacttttttaaagactactaaatactcaatatttgctatcagtcaaacattaaatacttcaaaaagacagatgaaatgtcgtcttgggttagctgttagaaataaagatgaagctataacaatattagaagaaataatgaaaaatggtattaacgctaatgtgaacaatgattataaatttaacatcataaaagataagcatttcttttttcatgactatattaataagttcaaacaaaaggcaattaatataagtgaaaaaagcacttgctatgatattgtaaacctatttacttataatgaatatttaaatcttgatggttattattttaatagtaatttcactaaagttagtttaccatcttatccatttagtaaagaaaaagtatgggctactagctattttgatcatttgttaggttttaaaatttatgaatctgaagaaaagtgtatctttgaaaataaatttcaaaaaaattccaattggattttaaaggaacatcatattgataataatagtgttttcccaggtacaacatatatagaaatggcgacaagatttgttcaaaaaaaatacgacaaaattaaagggctggatattaaaaatgtacacttcttcaatttattgaaaattaaagataatgaagaaattactttacgttttattattaaaagtcatactaataaatttatttttcaagtcattcaaatgaaaaataattcagagtatcaaaaaattgctgaactagaattacgtatttttaacgaaaggcttaacaatactataaatattgatgaaattataaatagaatgcattcacaaatcgatttagataatatagatgaaaataatattaggaaagatacaataaatttaggtaagcattgggatactactcggaaagttttttataataataatgaagtcttctgtaagcttagtttagatacaaaatttcaagaagaagataaacgttatctttttcatccaagcctaatggattgtgcagtaaactctgctaatttcacactagaagaaggtttttatttaccttatttttataaaaaaatatctttttataacagtgtacctaacgaaatatttgtattgataactaaaccagaaccaattcaatctaatgatttaggtgaatttgatgttaaagtagcaaataaaaagggagaaataatttgtgaaattaataactatactgtaaaaaaagttaacccacacaaaaatgatgacttaacttatcaatatattttagaaaaaagagaagagaaattatacgctaaacccaaaagaaagttattagtatacgaaaattacaatgatacattattccaaagacttaaagataatggattttctcctatttccattgataatttaaacgaattatactctaacaataataaagaagttatagacgtgctactaacatcagataaaacagattctttaaaatcgttaaaacttttccttgagaaaattaagcagctttattcattaatatctgttgatactaagattttctatattaataaacaatctactacaaaaaatgttatggcaagcaatccatttgaacaagctaaagaaggattaattaaagtactaggtaaagaaaaaaataaaaataatattaaactaataacctatgatgaaaaaaccaactttgaaaaaattcttaacgaaatgaaaaataacagtgtccacaaagaagtgaaatattataataatgaaagatatgtaaaagttttgaagaaatttaacgttcctgtttctcctattccacaaaaaagtaaaatcaaaaaaaacatattaatagttggtggtttaggtggcttaggtatagagttgactaattatttgataaaaaataacaatattataattataggtcgttcagagttaaaattaattaaaaataaactcgcctcccttaagaataaagctaatatatataaaactaatttatcatattttaaagtagatatctcagataaagaaaatagttcaaaaaagttaaaaaaaattagtgaaatatacaatcagattgatgatatatatataactgttggtaatgaaccattaggttttatcaataatatagatagttcaaacttcatagaaaatatttcaagcgtaattattggtactgaaatattgttaagcacttttaaagataaaggtttgaaaaattttatctctttctcttcaattaatacactattaggagtacctggagaagcagattatatagttgctaattcatatatggatggatttagcgagtgggcatctcaaatctatagccatattaattttaaaactatttcttggggaggatggaacaaaacaggtttaagaaaagaaattatttccaataataatagtggtttcaaacctttatcacctcaaatagccttagaaaatatggcaaaagtaattgatcaaaaagacaaatatataataatcgctgatttagaagaagacaaggtttctgctttatcaaatacaacaggtctttatttttcaaataaaaattttctcgagaaaacaagaaatccagataatttgaaagagactagaaacactaaaaccacttcggaacaaaatatcaatgaagtagttagcaaaatatggcagaacctctttggcttaaaaaatattaatccagatacaaagttttttgaccttggaggagattcaatcttagctacctatctctttaaagaattagaacaacatttcgaaggattaattgatatatcagatatatttacttacccatcaattaattccataagtaagtatatatattccgctcaaaaatataatgataaaaatataaggtataagaatgacagcctagacgataaattacaaaagttaaaaaacggcgaactatcagttagtgatttagaaaacgaggtgtaa

SEQ ID NO: 7650 - DNA, 4686 bp, Staphylococcus epidermidis
atggaaaatttaaaaaaatatatatatgaggaagtttccaaaaataatatgtcaattgataaagccaaggagttattaggggaaatccaaaaaaaacatgaagatatagcaatagtcggtatagcgtgtaaatttgctaatgcagaaaaccaacaagagttttggaataatttattagaaggaagagaatttaaaagaggatttcaagaaagacggttaaattatattaagaatatttcttcgtcccctctatttactcagtttttgggaagtatacctttaaaaggagaagagttaaatgatatcaggccaagtggttacctttctgacatagataaatttgacccggaatttttcaatatttccccgagtgaagctagagctattgatccggatcaaagagtaatgttagaaaatgttcaagatgcattaatagatgctggttacactcgagaaaaattaaacaatagtaaaactgctgtttttataggtaaagataatactaatgacacattataccgttatattactgaagaagaatctagtagtatgacaggaaactggcctagtctaatttctggacggattagtcatcttttaaacttaaaagggccgtccctactcattgactccgcatgtagttccggtctaactggagtgcatttagcatgtaagtctcttcaaaataaagagagtaacttagttatagtgggtggcgtctcaataaattcatttccttcgtttaataagtttccttattcattaatggaatcatcagataatactttgagaccttttgatgaaaatgctaacggtactagattctgcgaaggtgttgctacagttatattaaaaccactaaattccgccctcaaagataaaaacaatgtttatgctgtaattaaaggaagtgcaattaacaatgacggcaacacaaatggaattacctctcctaatgttgactcacaagaactagttctacacgatgcatggaaggacgctcaaattaatcctgaaaatattcaatacatagaaacgcatggaacgggaactaaaattggcgatccgattgaagtaaaaggtttaacaaatgccttttctaagcataccattaaaaggcaattttgtggtatagggtctgtaaaagggaatattggtcatactgtcgcagcttctggtttagcctcattaattaaagtggccctttccttaaaaaataaaaagataccaaaaacaataaattttcagatgcctaataattttttgaattttcctactacgcccctatatatggtgaacaacacaacaaaatggggatattctaatagcaatttaaaattagccggagtcagttcttttggttttgctggaactaattgtcacatagttctaagtaatattaaaaatgaaaatatatatagaaattataaagaaaattatagcgatagaacgaattatataataacgttatctgctaaaaataagaatgcgttaattcagaatgttaaaaactatttacaaaaattgtctacaactaaaaatataagtattgaagatattagttatactaccactttaggcagagaccactttaattatagattagcattactagttaatagcgttacacaacttcaagattccttacgtgaatttttacttaataattcaacaaatgtattaagcaaaaatatttattttggtattcataaaaaaatacccaatagtagaaaaccgattagtgaggaggaaaaaagctctcaggaattaaatagattaactaaaaagattaatgtcataattgaagaagaaataaatgctgttaatattaataaatttagtgaattaatatgcaagtattatattgaaggcgcttcaataaattgggataagttaaatcagttcaataaaagaggaaagattattagccttcctttatacccgtattctaagcgtatcctttggagtaaaataaaggtacctaataatgaacatttaatcgataataatattcatccattagtacataaactagcaattgattcaataaaagaaaaaatatatgtatcaagtttaaatttcgagagtcactggagcattacagatcatcaagtaaaaggtaaaaacgttttacctggtacagcgcatgtagaaataattcgaaaagttctgtctgagtacctacatacaaacaaaatctctcttcataaccttatattttattcacctattgtattaacagaaactattaaagaaatacagataataataaacaaagataaaaatgtagtgcaaatttgcagtaagaacaacaatgaatttaatatacatagtgaaacaagttttgaaataaactctaacgaccaatgcttctatgatatcgataaatttaacaaaaaagatgatgtgaaaaggcaagatattaattacaagcacaattttatcaaaaatgatacatttacattcggtccaaggtggttgaattttaagtctttagcttataggtcaaagaatgcagagtttcaacagttagcagaattaagaataaatgataaatttaaagatgatttaaaagaaaactatatacattctgcactattagataatgcggttaatctttacattgatgaaaatgatgaagaagtttacttaccattttcgtatggaaaaattaatatctttcatgaaatgccggaacacttttattcattagtaacaaaaaaagaaactaagaaagaaactaaaaaatttgatatatctctgataaatgaaaataatgaaatttttattgatataaaggattatataataaagaaatctcataatactgatggaattatacgtgacaatatctttcagaatacgtacaacgttaaatggcaaccttcagaaaatactttaactcctttatctatagataaaactaaaatagttatattgtaccaaccaactaactttagtaaaagtttagctaaaacattaatcgaagaaaatcctgataactacattcccatatgtatatccaatcctaaagtgaatgatgaagcacatcattatttaaatcttaactcatacgatagttataaagaattatttaagtgtttaaaaactgaaaacatagatactatagtagatgtatcactgtatgaagactttaaaaagcattgtgaaaactctatagatagcaaacattatttttatatgtttaaagcgttgtttgatataacatttaaaactgattttacttataaattaatcttaaataacgcttatgaaattgatggtaatgaagatcatatttctcctacgtcaactgaaatatcagggttcttcaaaggtattttggaagaggttccaaaagcgaaattttcaatatatgacatagactttaaaactgattttaaaaaaatattaaacgaaatttggaaaccaacaacttcatttttaaatggatatagaaacaataaaaggtatattcctgagataattaaagaaacggaaaaaacttcaaatataaataaagatgtatattcaaattcggattcatatttaattactggcggtttaggagatataggattgcacatagctaaaaatatatctaatcaaaaaaaagtcacttttcatttactaactagaagaagaaaaccgtttaaagatgatatattaaaagaaattacaaataacggttctactgtctgtatccatactttagacataacaaatgaacaaaaaatgaaagagctatctttaaaaatcggaaaagttgatggaatatttcattgtgctggtaatgctggagatggttttgtatacaataaatctataacttcattttctaacgtactagatcctaaaaaactaggaatgttgcatatagaaaagtattatttacatgaaaatataaagtttttagtttgtttttcctctattgtttcattattaggaggagccggacaaacagattatgcagccggaaactcatttatggatggattcataattaacttaagaaaaaaaggttttaatgctatttctataaactggccttcttggaaaaatataggtatggctaagagatataatgtttctgatcaaaaaactatattcagttctatttcaacagaagaggccacatcgataatagaaaaatcaattgttcacggactaagtaactttataccaagtaatattaattactatttgattagtcaagttaatgaactattacctattaagttctccgattcactattaagtactgtaaaagacttacaaccaaattcacgtttagataaaactattaacaaagttactcttaaaggccaaactaaggacttcactaatacagaaattatagtttctaatgcttatgcaaatatattaaatattgaagaattagatgtttttgagagttttaattcgctcggtggcgattcaataatggctacaaatttattaaaagagttagaaaagaactttgaaggtatagttgaaattactgatattttcacatatggcagtgttaaggaactttctaattttattgatgaagagttaagaaaaaaaaataatgcttacgaaaaaaataatgatcttatttctttaatggaagaactatctcaaggacatgctaacgtagacgaaactttatctaaattaaacgggggggacaaaaatgagtaa

SEQ ID NO: 7651 - DNA, 1503 bp, Staphylococcus epidermidis; identical to SEQ ID NO: 2677

SEQ ID NO: 7652 - DNA, 6393 bp, Staphylococcus epidermidis; identical to SEQ ID NO: 2678

SEQ ID NO: 7653 - DNA, 1647 bp, Staphylococcus epidermidis; identical to SEQ ID NO: 2679

SEQ ID NO: 7654 - DNA, 1719 bp, Staphylococcus epidermidis; identical to SEQ ID NO: 2680

SEQ ID NO: 7655 - DNA, 687 bp, Staphylococcus epidermidis; identical to SEQ ID NO: 2681

SEQ ID NO: 7656 - DNA, 726 bp, Staphylococcus epidermidis
atgaataataattttttaaaaattagttatctaaatattgatgaaataagcattcaagaatgtttaaaacttttacacttatgcagtaaagaaaaaaaaagtcagactaaacagcttatttatgatctaaactataaacaaacaatttgtgcaaactcattgatttattatttattatattgtaaaacgggcttattgcattacaaacctattttacaatataataagtttgggaagccgtatcttaacccaatagtagaatttaactttaatatttcacattctgaaaattgggtggtcttagcacaatcagattctgatgttggtattgatattgaaaaaatacaaccagatatctataatatagctaaaaattattttagcaccaccgaacgacattatataaattctagtttttctaaaactgaaaaaaataatcgatttataaaaatttggactttaaaagagagcttcgtgaaatttttaggtacaggcttaaatacacatttaaatacattttctatatgtgatatagaagaacccatacatactgtaagatttcataaagagccaattaaaaataatatatatttaaaaagctttaactttgataataacttttacattgctacttgttcaagagcaacttatattgaaatggaaaaaatcaacataaatgatttgcttgaattttccaaaaaatctcgtattctttctttcacataa

SEQ ID NO: 7657 - DNA, 306 bp, Staphylococcus epidermidis; identical to SEQ ID NO: 2683

SEQ ID NO: 7658 - DNA, 207 bp, Staphylococcus epidermidis; identical to SEQ ID NO: 2684

SEQ ID NO: 7659 - DNA, 1344 bp, Staphylococcus epidermidis; identical to SEQ ID NO: 2685

SEQ ID NO: 7660 - DNA, 261 bp, Staphylococcus epidermidis; identical to SEQ ID NO: 2686

SEQ ID NO: 7661 - DNA, 801 bp, Staphylococcus epidermidis; identical to SEQ ID NO: 2687

SEQ ID NO: 7662 - DNA, 201 bp, Staphylococcus epidermidis; identical to SEQ ID NO: 2688

SEQ ID NO: 7663 - DNA, 558 bp, Staphylococcus epidermidis; identical to SEQ ID NO: 2689

SEQ ID NO: 7664 - DNA, 156 bp, Staphylococcus epidermidis
atgtaccttggattaggtctaggattaattgtttccgaagtacaaagagttaataaagatattttatctcaatctagtcactcattagaaaatctagtagatgttgacaaaccggagcacccatttctaaaattgaaagtttctcacaaaaaatag

SEQ ID NO: 7665 - DNA, 1068 bp, Staphylococcus epidermidis
ttgttaacggtaaatcaagttaaagaaattgtaggggcattaaaggatccgattattgatgtgccattgagagaatctgaaggtattgttgatgtctctattaaggataatattaaccatgtgagtgttaaagtggcaatggcgcaattagggggacagccacaattagatcttcaaatggctatagtcaaagccttaaaagaaaatggtgcaaatactgtgggaattcgttttgaagaacttcctagcgaagtagtcgaaagatatataggaaaaggtagtgaaaagcccaaaaccattgaagaactattatcacaaaataatccagttgaattcatttctatagcttcaggtaaaggtggggttggtaaatcgacagttgctgtcaatctagccgtagcattagcaagagaaggtaagaaagtaggattagtagacgctgatatatacggttttagtgtgcctgatatgatgggaatagatgaaagaccaggtatagatggtaaggagattatacctgtagagagacatggagtaaaagttatttcaatggcattttttgttgaagaaaatgcaccggttatttggagaggtccaatgcttggtaagatgcttacgaatttctttacagaagtacagtggggagaacttgattacttacttcttgatttaccacctggcacaggagatgtagctttagatgtacattcaatgttaccatcaagtaaggaaattatagtaactacaccgcatccaaccgcggcgtttgtagcggcacgagcaggtgcaatggctaaacatacagaacatacaattcttggtgttatagaaaatatgagctattttgaaagtaaagaaacaggtaaaaaagagtatgttttcggaaaaggaggaggcaaaaagctttctgatgaacttgagacgcaattatttgctgaacttcctttagaacaacctacatggaatcccaatgacttttcgccttcgatatatcaatcggatgatcgtttaggagaattgtatactttaatcgcaagaaaagttatagcaagcacccaaaaacaataa

SEQ ID NO: 7666 - DNA, 1440 bp, Staphylococcus epidermidis; identical to SEQ ID NO: 4895

SEQ ID NO: 7667 - DNA, 468 bp, Staphylococcus epidermidis; identical to SEQ ID NO: 4690

SEQ ID NO: 7668 - DNA, 1338 bp, Staphylococcus epidermidis; identical to SEQ ID NO: 4897

SEQ ID NO: 7669 - DNA, 684 bp, Staphylococcus epidermidis; identical to SEQ ID NO: 4688

SEQ ID NO: 7670 - DNA, 1188 bp, Staphylococcus epidermidis; identical to SEQ ID NO: 4899

SEQ ID NO: 7671 - DNA, 510 bp, Staphylococcus epidermidis; identical to SEQ ID NO: 4686

SEQ ID NO: 7672 - DNA, 261 bp, Staphylococcus epidermidis; identical to SEQ ID NO: 4685

SEQ ID NO: 7673 - DNA, 315 bp, Staphylococcus epidermidis; identical to SEQ ID NO: 4684

SEQ ID NO: 7674 - DNA, 1374 bp, Staphylococcus epidermidis
atgaatggatttaaaaaagttgacatagtaagaggtagaattaaatttatcactatgtcattgttagggattatattatttttagttcctataccagtcgttcaagatggaaagcagcaaacgacacttcctatagcttttttagctggtttattaaaagattggcttggtggtatcatgccaattttaattgtaaccatcataactgtatcaggtattttaacaatattatgctctacaatttataaaaataaattaaatcctcaaggtttaatgagcagtgctttcaacgttaaaataggatggcttgttttgagagtattagctgtcttcttttcttggttaacatttttaaatattggacctgaaatgattaaatctgaagatacaggtggattagtattttcaagtttattacctactcttgtagcagtatttttatttgctgcaatctttttacctttattaatggagtatggtctattagaattacttggacccatctttagacctatcatgcgacctttgtttactttacctggtagatcgacagttgataatctagcttcatttataggtgatggtacagttggtgttttaattactagtagacaatatggtgaaggatattactctagaagagaagcaacagtaatatccacaacctttagtgttgtatctattacgttcgctattgtcattgccgaaacaattagaatgcaagatcaatttttctatttttatttaacagttgtcatttcatgcttaattgcagcaatgattatgccaagaatttggccacttaaaaatattcctgacgaatatgctaaagaagtaagtgaagaggctcgtaatgaacagctaccagaaggcaaaacagcattaaaatatggttttgatttagcaactgaagttggaattaaatcgccagggtttaaagaatttttaatttcaggttttaaaacagttgtagatatgtggtttgtaattttaccagttgttatgagtataggaacaatagctaccattattgctaactacacgcctgtttttgaaattataggaaaaccatttgttccagtactagaattgttacaaattccagaagcacataaagcatcacaaacaattttaattgggtttgccgatatgttcttaccttcaattcttattgaaggggttcaaaatgatgtaacacgttttgtaattggagcattgagtatctcacaacttgtgtatttatctgaagtaggcggcgtgattcttggttctaaaattccagttagtataagtaaattatttatgatttttttaattcgtactatcattacgcttccaataattgctttattagcgcatttatttatcggataa

SEQ ID NO: 7675 - DNA, 876 bp, Staphylococcus epidermidis; identical to SEQ ID NO: 4682

SEQ ID NO: 7676 - DNA, 1032 bp, Staphylococcus epidermidis
atgactatggtgaataaagatagtcaatccgctattgaacaaaaaaagaaaaagcgcactacactcacttttattgtgggtgtgtgccttctttttatttcagtatatttgaatttagcgattggttcttcaaaaatacaatttaatgatattttaagttatgtaactggacacacgaatacaaaggcaactttcttaatacacaatgtacgtatgccaagaatgctagctggtttaattattggtggcgctttagcaattgcaggtttattgatgcaagcaattaccaaaaatcctttggcttcaccacagatttttggtgtgaatgcaggtgcttccttcgttattgtacttataactgtacttataccatcgctaggctcttactctacaattttagcgataattggtgccttcttaggaggttttactgtttatacattgtctggctctactaagtcgattacaccgattaaattagcacttgcaggtatggctattcatctgttctttagtagtatgactcaaggtataattattctaaatgaagattctaatgatacagtgatgttctggttagttggttcattagccggtataaaatggcaacagattatatttatcttaccatttttactccttgctatttttgtgaccatatttatgggaagacaattaactatattagagttaggtgatgatattgccagaggattaggacaaagaacagaaatcgtcagaatgattgttggaatattggtcgttgttcttgctggtgtttctgtttctattgctgggcctataggatttgtaggtttgatagttccacacatagtgaaaagatatataaataaaaattatgtattgatgatacctttaacatttatattcggcgctactttattacttatttctgatgtattgtgtcgcttaattacttatccattcgaatcgccagtaggtattgttacatcatttgttggtgctttttacttcttattcataactgttagaggggtgaatcgcatatga

SEQ ID NO: 7677 - DNA, 996 bp, Staphylococcus epidermidis; identical to SEQ ID NO: 4906

SEQ ID NO: 7678 - DNA, 1062 bp, Staphylococcus epidermidis; identical to SEQ ID NO: 4679

SEQ ID NO: 7679 - DNA, 1758 bp, Staphylococcus epidermidis
atgaatcataaggaatggcttttagctgacaaaaacatccaatatcgaacgattaacgcaatgattaaggaacatattgtttctgaaggtatgcgtattaaagaaggtacgtgtaaagttgaaatttttctcaataatcaccttttatcgttaaaagtagcgcgaaaaagtgccttaaaaagatacgtttttactggtgacatagtattaaaaaataaaaaattgtctcaatcaattgaaagtttagaagaacttcttcaaatactaacggaaatatttcatatcaacatttcaaaacgattatacgatgaattaatacatagtagggatagtttgtatgaaacgtacaaacatttttataatagacaaacactcattcatcagagtatgaaatttagtaaattacccgattctataaattttattgcttggctgcaacatttacaagatagtggtattacagatgatttaagttactcggaaagtcttgtgatagaagggcatccaacacatcctttaacaaaaactaaattgcctctcagtactaatgaattgaaactttatgcaccagaatttgaaaaagttattccattaaatattatgcttattgaaaaaaatcatgtagtaacaacagcaataaatgatgatcaaaattttattctaaatcaagttattcctgaatatcgagatcgtttaaaatgctacctcgagccacttcgattaaatcttaacgattacagagtgatgttgatacatccttggcagtatgatcatactatcggcgaacaatttgaagaatggatagccaagaaaatcttactacctacaccatttactgttgagtccaaagctactttatcatttagaacaatggatttaattcatacaccatatcatgtgaaattgccagtaaatgttcaagctacaagtgctgttagaacagtttcatcagttacgactgtagatggtcctaagttaagccatgcattacaaggattgcttcaggaatttccagaacttcaagtcgcgatggaaccttatggagcttatgctcacacggcatctgatttatcaaaacaattagcgcttatcatacgtcaaaaacctacgatatatgattatggttgtacagttgtaacagctagtttagttaatcctaatccaattgataatcaggcagttgtagatagttatttaaaatggatagaaaatgaaatcacacttgatcatattaagcattttatagcaatttatacacaaaccttagttacaccgcttattgcgtatattcaaaattatggcatagcacttgaagcacatatgcaaaatacgattgttaatcttggacctaattataaaatgaaattcattgtacgtgatttaggtggttctcgtatagatttaaatacacttaaacagaaagttcctcaaatagatgttacaaatgaaagtcttattgcagatactattgaagaggttattgctaaatttcaacatgcagttattcaaaatcaactatcagaattgattcatcattttaatcagtatgatgaagtaatagaagaagaattatttgaaattgtgcgtgaagaaatcgaaatggcaatcgataatgacaagccacatgctgaaaaattgaaaaaaatattgtttgggtcaactatcacagtcaaagctttattaagtatgagaatggaaaataaagtgaaaaaatatttaaataccaagttaggtaatccaataaaaaaagaggtgtag

SEQ ID NO: 7680 - DNA, 1182 bp, Staphylococcus epidermidis; identical to SEQ ID NO: 4909

SEQ ID NO: 7681 - DNA, 1962 bp, Staphylococcus epidermidis
atgaatttcaatcaatttataaataaacaaaatataataatgactgaagatgaacataatgtatatgactttcttaaacatcatgatcctaattggtcttctaattatattgatcatttattagatggacgtgataaagtaagtcaacgtttaattacatctttacatagggagaatttagtaaaaagtcgcgatcatagtcgtatacttaatcgacatcagtttgctggatacggagttaatgtgattgccattttagaaatctattttccaatatctaatatttatttgtatgcaccaataactggaatgcatgcattcgatcgcattgatgttgaaggacctttttattttaagaatctaagtaaagaagatgattttgaacgtgtactacatcctaatcaaatattagattggatattaattgaagatgaaaacttaaataacgaggctagcgtacaatttagaaatgatttaaataatagtgcagctaatatgacttttgctttaagtttccagcactatacgatgcgtaatgaaagagcgccattatataaccttattaaaaatgcaaatgatagttacttgcgttccgaacaatctgtcatcgaaggtcatccccttcatcctggtgctaagttaagaaaaggaatgaatgctgaggaaaactttatgtattcatcagaatttggtaatgttatttatctaaaagccgtgtttattcataaaagtataagtcgtattcaatcattgaatgtagattacaatgttgccgtaaagcaaatgtttcccgacttaattaaaaccttagaaaaagaatttggcgaagattttaatttacaaaattatcatttaatgatggttcacccttggcaaataaaacatattttacaaagtgattatcgggatgaactaaatgaaaagttaatattgataagtaatcattcggtaccatactatgccggtctatcatttagaacgttagtacctaaacaacctgatttatccccgcacatcaagttatcgacgaatgtacatataaccggtgagattcgaacattgtctgaacagacgacatataatggaccattagtgacgcaaattttaagagagattatgtcaaaagatgaagatttttcacattatcaatctacttatatcgatgaaaatgcagggatacacttttataatcgaaacgacaatgaggcaattcaaacagatcgaagtgaacaattagggactttgtttagaaataatttatatcaatttatatctaatgaaacagtgccagtaattccatcaagtttggttgcgacctatccctataatactgaagcaccaatctgtacgttaatcaaaacgtatcaaaatacgcatcaatataaaaattatgaagaagcagcgaaacaatggattaaagactatagcaaagctcttcttggcttagttatccctctttattcaaaatatggaatttcgctagaggcacatttacaaaattcagtggcaacttttaataaagatggctcactaaatatgatttatatcagggactttgaaggattacgtattgataatgaacaattgaataatgctggatttaccactagacatttccatgaaaaatctagaatccttacaaattctaaaacatcagtatttaataaaatgttctattcaacagttcaaaatcatttaggtgaactcgttattacaatagctaaatattctaatagtaaagtccttgaacaagaaatatggcaaattatttcacaaacagtagaagacatttttaatcacatgattcacatttcaaaacaacatctcaacaacatcaagcgcactattttcgcatccgaaatcgattataagtgtgtcacaacaatgcgtttagaggatcaagcacatgaatatacgtatattaaagtgaataatccacttcatagaaagaatgatttataa

SEQ ID NO: 7682 - DNA, 501 bp, Staphylococcus epidermidis; identical to SEQ ID NO: 4675

SEQ ID NO: 7683 - DNA, 240 bp, Staphylococcus epidermidis; identical to SEQ ID NO: 4912

SEQ ID NO: 7684 - DNA, 537 bp, Staphylococcus epidermidis; identical to SEQ ID NO: 4673

SEQ ID NO: 7685 - DNA, 1011 bp, Staphylococcus epidermidis
atgaaagcgataggatttaagtcttcattccaattagatgaaggaaattgttttgaggaatttaactttgatatacctcatccatccggccatgaattattagtcaaggttcaaagtattagtgtgaatcctgttgatacaaaacagcgtacaatgccagttgacaaagtgccacgtgtacttggctttgatgctgttggtgtgattgaaaagataggagatcaagtgtcaatgtttcaagaaggggacgtcgttttttattcaggttctcctaaccaaaatggttcgaatgaagaatatcaattaatagaggaatatttagtagctaaagcacctacaaatttgaaaagtgaacaagcagctagcctacctttaactgggctaacagcttatgaaacgcttttcgatgtttttggaatttcaaaagaaccatctgaaaataaaggtaaatcattgttaataattaatggagcaggtggtgtaggtagtattgcaacacagatagcgaaattttatgggttgaaggttattacaactgcttcgagagaggatactataaagtggtctgttaatatgggtgctgatgttgtactgaatcataagaaagatttaagtcaacaatttaaagataatcatattgagggtgttaactatatcttttgtacattcgatacagatatgtattatgaaatgatggttaacttagttaaacctagaggacatattgcgacaattgtcgcatttaattcgcaacaagatttaaatttattgaaatctaaaagtgtaacatttacgcatgaatttatgttttcaagaccattacaccatacagatgatgtaatcaaacatcatgaatatcttaaggatataacagaaaaggttaaacagggatattatcaaccaactaccacgaaagttatcgacggattagatgtagatagcctttatgaagcgcatcaaattttagagtctcattctatgattggtaagcttgttatcaatcttaagtaa

SEQ ID NO: 7686 - DNA, 1005 bp, Staphylococcus epidermidis; identical to SEQ ID NO: 4671

SEQ ID NO: 7687 - DNA, 1026 bp, Staphylococcus epidermidis
atgagattaagtttacttgattatgtcccgttgttcgaagggcgtaccccaaatgacgccctaaagcatagtattaaattagcccaacacgctgagaaacttgggtacttacgatactgggttgcagaacatcatcaagtttattctgtcgtttcgagtgcacctgaaataataatgatgtcgattttagaacacacacaacacatcagagttggtagtggaggtgtgatgttaccacattatagtccttataaagtagctgagcaatttaaaattatggcagcaagacacccccaacgtatcgatatggctatcggacgttcgccaagctttaaaaatgttaatgcagcactaaatgaaaacaaaaatgaaaaattaccattcaatactcagattactgatttgcttaaatacttcaataacgatacaactcaagaccatcgttttaaatcattattagctacacctatggttacttcatttcctcaactatatattttaggtatgagtaatagaagcgcaaaattagctgctcagcgcggactaccttttgttattgcacgaatgggacaatctgagacagaccttcatgaagctataagcacttatagaaaatattttaaagcttatcatggtgaaattaataatgcgaaaccatatgttattttagcaacttttgtggtaacagcttctaatttatctagagttaaacaattgctacatacgcttcaactttggttgatgcgtattaactatttaaatcaacctaagagttatccatcgattgaaacagcacagaacaagcattatagtcaacgagaattagaaaagcttgaaaagatgaaatcgaaaatcatatacggaatgccaaatgatgttgcggaacaacttaccttacttcatcaacaatttaaagtggatgaaatcatcatcttacctcatgtatttggtgaagacgctagaatagaattaattgagttaattgcgaatgaattgattccatcttgttcacgcgatgaattttag

SEQ ID NO: 7688 - DNA, 870 bp, Staphylococcus epidermidis
atgatgaagtcaaaattcacaattctattatttacaatcttttctacaacagtattagttttggttattatttataacaaaactcaatcccaatcatacatttcgactcactattctaataataaaataaaaacaacagcaacactttttttacatggttatggtggtagcgaacgctcagaaacgtttatggtcaaacaagcgttaaataaaaatgtaaccaatgaggtgataaccgctagagtgagtagtgaaggaaaagtatattttgataaaaaattaagtgaagatgcagcaaaccctattgtcaaagtagaatttaaagataataaaaatggaaattttaaagaaaatgcttattggattaaagaagttctatcacaactaaaaagtcaatttggaattcaacaatttaattttgtaggacattcaatggggaacatgtcatttgctttttacatgaaaaattatggggacgatcgacatttgccacaacttaaaaaggaagttaatatagcgggagtttataacgggattttgaatatgaatgagaacgtgaatgaaattatcgttgataaacaggggaaaccaagtagaatgaatgccgcatatcggcaattgttatcactgcataagatttattgtggtaaggaaatagaagttttaaatatctacggagatttagaagatggctcacattcagatggacgtgtgtcaaatagctcttctcaatcgcttcaatatttactaagaggtagcactaagtcttatcaagaaatgaaatttaaaggtgcaaaggcacaacatagtcaattacatgagaataaagatgttgcaaatgaaatcatacaattcttatgggaaacttaa

SEQ ID NO: 7689 - DNA, 1413 bp, Staphylococcus epidermidis
atgactaagaaattacctgatgactttatttttggtggagcaaccgctgcttatcaagcagaaggagctactcagactgatggtaaagggcgtgtcgcttgggacacgtatttagaggagaattattggtacacagctgaaccagcaagtgatttttataacagatatcctgttgacttggaattaagtgaacgctttggtgtaaatggtatacgtatctcaattgcttggtctcgtatttttcctaaaggttacggtgaagtgaatcaaaaaggtgtcgagtattatcataatcttttcaaagaatgtcataaacgtcatgttgaaccttttgtaacattacatcactttgacacaccagaggtacttcacaaagatggagatttcttaaatcgtaaaacaatagactattttgtagattatgctgaattttgttttaaagaatttccagaagttaagtattggacaacattcaatgaaattgggccgattggtgatggtcaatatttagttggtaaattccctccaggtatcaaatatgactttgaaaaagtattccaatctcatcataatatgatggttgcacacgcacgtgctgttaaactttttaaagatgaaaattataagggagaaataggtgttgtccatgcattacctacaaaatatccatatgatccatctaatcctgaagatgtgagagcagccgaacttgaagacattattcataataaatttattttagatgcaacataccttggtaagtactcacgtgaaacgatggaaggagtacaacacatcttatctgtgaatggtggtcaattagagatttctgatgaagactacaaaattttagatgaagctaaggatttaaacgatttcttaggtattaattattatatgagtgactggatgcgtggttttgaaggcgaatctgaaataacacataatgccactggtgataaaggtggatctaagtatcaacttaaaggtgtaggacaacgtgaatttgatgttgatgttcctagaaccgattgggattggatgatttatccacaaggtttatatgaccaaattatgcgtgtagtaaaagattatccgaattatcataagatttatattactgaaaatggattaggatataaagatgtattcgacgaaaaagaaaaaacagtacatgacgatgcacgaattgactatattaaacagcatctaagtgtgatagcagatgcgattgcagatggtgccaatgttaagggatacttcttatggtctcttatggatgtattttcatggtcaaatggttatgaaaaaagatacggtttattctacgttgattttgaaacacaagaaagattccctaagaaaagtgcatattggtacaaagaacttgcagaaagtaaagaaattaaataa

SEQ ID NO: 7690 - DNA, 1749 bp, Staphylococcus epidermidis
atgaataaattaatagcatggatagaaaaaggaaagccattctttgaaaaaatatcacgaaatatttatttaagagcgattcgtgatggatttattgctgctattccaattatcttattctcaagtatatttattttaattacctatgtaccaaatgtgtttggttttacttggagtaaaactatggaaggtatattgatgaaaccctataactatacaatgggaatagttggtttgcttgtagcaggaaccacagctaaatctttaactgattcttacaatcgaaaactagataaaacgaatcagattaactttatttcgacaatgatggcagctatttgtggatttttattcttagctgctgatcctgttaaagatggtggattttcaagtgcatttatgggaacaaaaggtttattgacagcctttatttctgcgtttattaccgtgattgtttataatttctttgtcaaaagaaatattaccattaaaatgcctaaagaagtaccaccaaatatatctcaagtatttaaagatattttccctttatcagccgtaattttaattttgtatgctttagacttactttctagagcaatagtccacacgaatgtagcaaatgcagtattaaaagtatttgagccactatttactgcggcagatggttggattggggtaacactcatattcggtgcgtttgcgttcttctggtttgtaggtattcatggaccttctattgttgaaccagcgattgcagcaattacttatgcgaaccttgaaacaaatttacacttaatacaagctggagaacatgctgataaagtaattacaccgggtacacagatgttcgtagcaactatgggaggaaccggtgcaacattagttgttccatttatgtttatgtggttaacaaaatcaaaaagaaataaagcgataggtagagcatcagtcgtacctacattctttggtgtcaatgaacccatactttttggtgcaccactagtactaaatccggtattctttataccttttatttttgcacctatagtaaatatatggatttttaaattttttgttgatgttttaaatatgaatagttttagtatctttttaccttggactactcctggtccactcggtattgttatggggactggatttgcattttggtcatttgtgttagcaatattacttattgttgttgatgtgattatttactatccattcttaaaagtatacgatgaacaagtgcttgaagaagaattaggaaataaagaagcaaataatgaattaaaagaaaaagtatcagcaaactttgatacgaaaaaagccgatgctattttagcaactgcaggggcaagtgaagcggatactgatgatacatcttcagttgatgaaacaacttctacatcctctacagatactattagtgaacaaacaaatgttttagttttatgtgcaggtggaggtacaagtggtttactagctaatgctttaaataaagctgctgaagagtatgaagtaccagtaaaagcagcagcaggtggttatggtgcacatatggatattatgaaagattatcaattaattatcttagcaccacaagttgcttcgaattttgaagatattaaacaagatactgatcgcttaggaattaaattagccaaaactgaaggcgctcaatatatcaagttaacaagagacggtgaggcggctttagaatttgtaaaacaacaatttaacaattaa

SEQ ID NO: 7691 - DNA, 315 bp, Staphylococcus epidermidis; identical to SEQ ID NO: 4666

SEQ ID NO: 7692 - DNA, 978 bp, Staphylococcus epidermidis
atgacaaaatcacaacaaaaagtgtcatcaattgagaaattaagtaatcaagaaggtattatttcagctttagcatttgatcaacgtggtgcattaaaaagaatgatggcagaacatcaatctgaaacaccaacagttgagcaaatagaacaattaaaagtacttgtttctgaagaattaactcaatatgcgtcttcaattttattagatccagaatatggtttaccagcatcagatgctcgaaataatgactgcggactattacttgcatacgaaaaaactggatatgatgtgaatgcgaaaggtcgtttgccagattgcttggtagaatggtctgcgaaacgtttgaaagagcaaggggccaatgcagttaaatttttactttattatgatgtagatgacacagaagaaattaacatacaaaagaaagcatatattgaacgaattggttcagaatgtgttgccgaagatattcctttcttcttggaagttttaacatatgacgacaatattcctgacaataaaagtgcagaattcgctaaagttaagccacgtaaagttaatgaagcaatgaagttattctctgaagatcgttttaatgtggatgtacttaaagttgaagtacctgtgaatatgaattttgtggaaggattttcagaaggagaagttgtttatactaaagaagaagctgcacaacatttccgtgatcaagatgcagctactcacttaccatatatttatttaagtgcaggtgtatcagcagaattgttccaagatacattaaaatttgcgcatgattctggtgcgcaattcaatggtgttttatgtggacgtgccacatggtcaggagcagttaaggtatacattgaagaaggagagcaagctgccagagaatggttgcgtacggtaggatttaagaatattgatgttttgaatacagtattgaaaacaacagctacatcatggaaaaacaaataa

SEQ ID NO: 7693 - DNA, 933 bp, Staphylococcus epidermidis
atgattttaacattaactttaaatccctcagttgatatatcttatcctttagatcagtttaatttagatactgttaatagggtatctcaaacaagcaaaacagcaggcggtaaaggattaaatgttactagagtattgtctgaatttggtgaagacgtaatagcaagtggttttttaggtggagcattaggtcaatatattgaagaacaaatagaaactactcgtattaaacaagcatttttcaaaatcaaaggcgaaacacgaaattgtattgcaatactacatgaaggacaacaaactgaaatccttgaaaagggtcccacgattgaacttaaggaatcagaggaattcaagtcacatctattaaaacttttcaaagaaactgatgtggctgttatgtctggtagtctgcccaaaggacttaatactgattattatgcggatattgtgagattagcaaaagaacaaggaattttgaccattttagatagctctggtcaatcacttgaggaagttcttattagtaatgtgaaacctacagtaattaaacccaatatagatgaattatcacaacttttaaattacaaagtaaccaatgatattaaagaattgaaagcggcagtaagtcagccaatatttaatgatattgaatggattattgtttcattgggcagtgaaggtgcttttgcaaaacataatcaaaaattttataaggtgaatattcccaacattaaagtagttaatcctgttgggtcaggagattctactgtagcaggtattgcttctggactcattcatcaacaaaccgatgaagagttattaaaaaaagcaaatgcattcggaatgctaaatgcaatggaacaacaaacaggtcatattaatacagataaatttgacgaaatattcaaacaaatagaagttatagaggtgtaa

SEQ ID NO: 7694 - DNA, 516 bp, Staphylococcus epidermidis; identical to SEQ ID NO: 4663

SEQ ID NO: 7695 - DNA, 429 bp, Staphylococcus epidermidis; identical to SEQ ID NO: 4662

SEQ ID NO: 7696 - DNA, 756 bp, Staphylococcus epidermidis
atgaacaaatatgataggttagatgaaatcacaaaattagtaaataaacgaggttctgtaagaacaaatgaaatcgtcgaagatctaaatgtgtcagatatgactgtgcgccgtgatctcgcagagcttgaagaaaaaggtgttctcactaaaatacatggtggtgctcgtagtaattcagctttccaatataaagaaatgtctcatcaagaaaaacatacacgttttattgaagaaaaacgatttatagcaaagaatgcagtagatttaattgaagatggagatactattttcttaggtcctggtactacagttcaaaaattagctgaagaaataaatcattattcattaacaattattactaattgtttaccagtatttaatatattaataaaaaaacaaacgttacatttcagagtctatttattaggtggggaaatgcgtgatttaactgaagcatttgtaggtgagatgacaaatcagttattaagtcaactaagatttagtaaaatgttttttagtagtaatggtgttaaagatggtctagctatgacatcctcaatagaagaggcttatacgcaacaaattgcacttagtcattcgttggaaaaatatttactgattgactcttcaaaaattggtaaggatgatttttcatcattttgtgagcttcgtgaactcaatgcagttttaacagataataatgacttggaaaagaaagaaaaaatagaatcatatgttgaggttattagctaa

SEQ ID NO: 7697 - DNA, 741 bp, Staphylococcus epidermidis
atgaaaaaaccagatattcaacagttaaaagatatcgtaaacaactctaatcaaattgttttctttacaggagctggtgtttcagttgcaagcggaattccagattttcgctcaatgggtggcttgtatgatgaaatatcaaaagatggacagtctccagagtatttgcttagcattgatcatttacatgataataaagaaagttttataaacttttatcatgaaagacttttaattgccgataaaaaacctaatattgttcatcaatggattgcacaactggaaaatcagcaaaaatcacttggcgtcatcactcaaaatatagatggtttacacgaagatgcaggtagtcacaatattgatgagctacatggtacacttaatcgcttttattgtattaactgttatgaggagtactcaaaatcatatgtcatgacacatcatctcaaatattgtgaaaaatgtggtaacgtcatcagacccgatattgttttatacggcgagatgttaaatcaaaaaacagtcttcaaggcattagataaaattcaacatgcagatacgctcatcgtattaggttcatcacttgttgtacaacctgctgctggttttgtatcagaatttaaaggtgacaacctagttatcattaatagagatgcaactccatatgatcatacagctagcttagttatacacgatgatatgactagtgttatagaagaaattgtaaatagtaatagttaa

SEQ ID NO: 7698 - DNA, 393 bp, Staphylococcus epidermidis; identical to SEQ ID NO: 4927

SEQ ID NO: 7699 - DNA, 438 bp, Staphylococcus epidermidis; identical to SEQ ID NO: 4928

SEQ ID NO: 7700 - DNA, 804 bp, Staphylococcus epidermidis
ttgcgtatattagttgaaattgcttatcaaggtaaccaatttttaggttttcaaattcagcaacaaggacgaactgttcaacaacaatttgaaaagattcttaaacgaatgcataaacatcatgtacgaattcatccctcaagcagaacagacaggggtgtgcatgcgtatcagcaattctttcatttcgataccgaattgaatattgataacaaacaatggcaatatgcgatgaatcgagctttaccagatgatatttacgttaaaaatgtacgaaatgtcgacgagtattttcattgtcgttatgactgcgtaggcaaacgctatcgttacaaagtttatcaaggtaatcatcgaaatccttttaagagtggtactgaaacttttgtttatgaaacattagactatgataaaatgaacaaagctgctcaagaatttataggtacacatgattttaccggtttttgttcacagaaaacagaagttgaaagcaaagtaagaacactctatcagagtgaaattgttgctactaaaaagggatttgattatgtcgtaacaggttctggatttctttataatatggtccgtgtattggtagctttcttaattgaagtaggaaaaggaaagcgtgaacctaatgacgtccctaagctcttagaggacaaaaatagaaataatgtgcctctcacagctccacctgacggattatatttagaaaagatttatttaagcccagaagaattgatacaagaatatgggaaagatataaaaatacactacaaaaaatcgttggaaaaacactaa

SEQ ID NO: 7701 - DNA, 807 bp, Staphylococcus epidermidis
atgaaaaataaattaatcattggacgatatcttcctatgcaatcaattattcatcagcttgatcctagagctaagttaatatttgtctttttctttattcttttaatttttttctgtcattcactaggtacatatgcatggttgtttctttttataatattatttattaagttagcacgtattcctttttggtttttaattaaaggattaacacctatcttcttcttcttggttttcactttttttatgcatgtgttatttactaatggaggtatcgtattatttcaatggaaatttatcactattgaatcaaatggtgttatggaaggaatttatatatcactaagattgatttttatagttatgattgcaacaatcatgacactttcgactagtccgattgatttaacagatgcttttgaaaaattatttgcacctcttaaagtgattaaagtaccagtgcatcaattaagtatgatgatgtctattgctctaaggtttataccaacgttaatggacgaattagaaaaaattatacttgctcaaaaatctagaggatcagaaataagttcaggaagtttaataacacgaattagagcttttatacccatcatgattccattatttatttcagcctttcaaagagcagaagaactagctatagcaatggaagtcagaggttatgatataaacatcaaacgaacaagctataggttattacattggcaatataaagacacattaacagtcttacttttaatacctatcgctactatattatttattttaaaattttcaggagtgtaa

SEQ ID NO: 7702 - DNA, 861 bp, Staphylococcus epidermidis
atgagtatacaatttaatcaagtgagttatatttatcaacaagggacaccttatgaatttgaagctattaaaaacgtttcactaactcttgaacagggcaagtattatgcaattattggtcaaactggaagcgggaaatccactctgattcaacatttgaatgctttattaaagcccactacaggttcagtcaacattaatggtttagaagttacaaataaaactaaagacaagcacttacgtcacataagaaaagaagtaggtatagtatttcaatttccagaatcccaattatttgaagatagtgttgaaaaagaaattgagtttggacctaaaaattttaatatgaacctaaaaaatgttaaagataaagcatttcaacttcttcttgaattaggcttttcaagaaatgtgatgtcatcctctccatttcaaatgtcgggaggacaaatgagaaaaatagccattgtttccattttggctatggatccacaagtaattattctagatgaaccgactgctgggttagacccgaatagtaaacaccaagtcatgtctttaataaagaaaatacaaatagaagaaaataaaacgattattcttgtttcacatgatatggatgatgtagcacgttattccgatgaagttgtagtaatgaataaagggacgatcgtagaaaaatcaaatcctagaaatttatttaatcaaaaaacgcaattattaaagtggcatatagagttgcctaaagtagtgaaattacagaaagatatcgaaaaaaaatataatatgttatttccaaagcttgccacgaatgaagaagagtttgtgaagttgtataaggagtggcatcatgaaaaataa

SEQ ID NO: 7703 - DNA, 810 bp, Staphylococcus epidermidis
gtgaatgggtcaaatcctatcattgaatttaaagatgtatcatttcaatatcaaagtgacgctgctttcacattaaatcgcgtttcattctcaataccagctggacaatggacttctattgtaggtcacaatggttcaggaaaatctactattgctaaacttatggtaggtatagaagaaccaagtgaaggacaaattctatttcaaaatctaccagtagactctcaaaataagcgagaagtgaggaaacatatcggaattgtttttcaaaaccccgataatcaatttgtaggttctatagttaaatttgatgttgcttttggtcttgaaaaccaacttgttccttataaagaaatggtatctaaagttaatcaagtattaactgaagtagatatgataaataaagccgatgatgaaccccattcactttcaggagggcagaaacaacgtgttgccattgctggggtacttgcacttaatcctgatgtgctgattttagatgaagcgacaacgatgctagatcctcatggaaagtcatctttacttaaccttgtaaatgaagttaaagtaaataatcatgttacaattatttcaatcactcatgatttagatgaagcaatgcatgctgatcaaatcattgtattgaataaaggaactgtttttaaacaaggaacacctcaagatatttttaagtgcgaagatgcactaatatcggttggattggacttaccatttcctttgaaaatgaatcgacttttaggttttgattcaacttatgtaacttatgaagggttgattaaaaaattatga

SEQ ID NO: 7704 - DNA, 369 bp, Staphylococcus epidermidis; identical to SEQ ID NO: 4653

SEQ ID NO: 7705 - DNA, 945 bp, Staphylococcus epidermidis; identical to SEQ ID NO: 4652

SEQ ID NO: 7706 - DNA, 390 bp, Staphylococcus epidermidis; identical to SEQ ID NO: 4651

SEQ ID NO: 7707 - DNA, 366 bp, Staphylococcus epidermidis; identical to SEQ ID NO: 4650

SEQ ID NO: 7708 - DNA, 114 bp, Staphylococcus epidermidis; identical to SEQ ID NO: 4649

SEQ ID NO: 7709 - DNA, 219 bp, Staphylococcus epidermidis; identical to SEQ ID NO: 4648

SEQ ID NO: 7710 - DNA, 648 bp, Staphylococcus epidermidis; identical to SEQ ID NO: 4647

SEQ ID NO: 7711 - DNA, 1293 bp, Staphylococcus epidermidis; identical to SEQ ID NO: 4646

SEQ ID NO: 7712 - DNA, 441 bp, Staphylococcus epidermidis; identical to SEQ ID NO: 4941

SEQ ID NO: 7713 - DNA, 183 bp, Staphylococcus epidermidis; identical to SEQ ID NO: 4644

SEQ ID NO: 7714 - DNA, 501 bp, Staphylococcus epidermidis; identical to SEQ ID NO: 4643

SEQ ID NO: 7715 - DNA, 363 bp, Staphylococcus epidermidis; identical to SEQ ID NO: 4642

SEQ ID NO: 7716 - DNA, 537 bp, Staphylococcus epidermidis
atgagtcgtgttggtaagaaaattattgacattcctagtgacgtaacagtaacttttgacggaagtcatgtcactgtaaaaggtccaaaaggtgaattagaaagaactttaaatgaaagaatgacatttaaacaagaagaaaacactgttgaagttgtaagaccatctgattctaaagaagacagaacagatcatggtacaactcgtgctttattaaataatatggtactaggtgtttctcaaggttacgaaaaaacacttgagcttgttggtgtaggttaccgtgcacaaatgcaaggtaaagatttagtacttaatgttggatactctcacccagttgaaattaaagcagaagaaggcattacttttgctgttgagaaaaatacaactgttaaagtatctggtgtttctaaagaacaagttggtgcgattgcttctaacattcgttctgtaagacctccagaaccttataaaggtaaaggtattcgctaccaaggtgaatatgtacgccgtaaagaaggtaaaactggtaaataa

SEQ ID NO: 7717 - DNA, 399 bp, Staphylococcus epidermidis; identical to SEQ ID NO: 4640

SEQ ID NO: 7718 - DNA, 186 bp, Staphylococcus epidermidis; identical to SEQ ID NO: 4639

SEQ ID NO: 7719 - DNA, 540 bp, Staphylococcus epidermidis
ttgaaccgtttaaaagaaaaatttaatacagaagttactgaaaacttagtgaaaaaattcaattatagttcagtgatggaagtaccaaaaattgagaaaatcgttgtgaatatgggtgtaggtgacgcagttcaaaattctaaagttttagacaatgctgttgaagagttagaattaattactggtcaaaaaccattagtaacaaaagctaaaaaatcagttgcaacattccgtttacgtgaaggtatgccaatcggtgcgaaagtcactcttcgcggagaaagaatgtatgaattcttagacaaactcattgcagtttcattaccacgtgtacgtgacttccaaggtgtttctaaaacagcttttgatggtcgtggaaattacacacttggtgttaaagaacaattaattttcccagaaattgactacgataaagtaacaaaagttagaggaatggatattgttatcgtaacaactgctaacactgacgaggaagctcgtgaattgttaacaaacttcggtatgccatttcgcaaataa

SEQ ID NO: 7720 - DNA, 318 bp, Staphylococcus epidermidis
atgcatatcaaaaaaggtgacaacgtaaaagttatcgcaggtaaagacaaaggtaaagaaggtaaagtagtagctactgaaccaaaaaaaggccgtgtcgttgtggaaggtgttaacgttataaaaaaacaccaaaaaccaactcaattaaaccctgaaggtggaattttagaaacagaggcagcaatccatgtttctaacgtacaattattagatcctaaaacaaatgaacctacacgtgtaggatataaaacagttgatggtaaaaaagttcgtatcgctaaaaaatcaggcgaagaaattaaagctaataattaa

SEQ ID NO: 7721 - DNA, 369 bp, Staphylococcus epidermidis; identical to SEQ ID NO: 4636

SEQ ID NO: 7722 - DNA, 264 bp, Staphylococcus epidermidis; identical to SEQ ID NO: 4635

SEQ ID NO: 7723 - DNA, 210 bp, Staphylococcus epidermidis; identical to SEQ ID NO: 4634

SEQ ID NO: 7724 - DNA, 435 bp, Staphylococcus epidermidis; identical to SEQ ID NO: 4633

SEQ ID NO: 7725 - DNA, 654 bp, Staphylococcus epidermidis
gtgggtcaaaaaattaatccaatcggacttcgtgtcggtgttatctgtgattgggaagcaaaatggtatgctgaaaaagactttgcttcacttttacatgaagacttaaaaatccgtaaatttattgataatgaattaaaagaagcgtcagtttctcacgtagatattgaacgtgcagcaaatcgcatcaatattgctatccatactggtaagccaggaatggttattggtaaaggcggttcagaaattgaaaaacttcgtaacaaattaaataccttaactgataaaaaagtacacatcaacgtaattgaaattaagaaaattgatattgatgcacgtttagttgcagaaaatattgcacgtcaattagaaaatcgtgcttcattccgtcgtgtacaaaaacaagctattacaagagctatgaaaaatggtgctaaaggtatcaaaactcaagtatcaggtcgtttaggcggagctgacatcgctcgtgctgaacaatactcagaaggaactgttccacttcatacattacgtgctgacattgattatgcacacgctgaagccgatacaacatatggtaaattaggcgttaaagtatggatatatcgtggagaagttcttcctactaagaacactagtgaaggaggaaaataa

SEQ ID NO: 7726 - DNA, 354 bp, Staphylococcus epidermidis; identical to SEQ ID NO: 4631

SEQ ID NO: 7727 - DNA, 279 bp, Staphylococcus epidermidis; identical to SEQ ID NO: 4630

SEQ ID NO: 7728 - DNA, 834 bp, Staphylococcus epidermidis; identical to SEQ ID NO: 4629

SEQ ID NO: 7729 - DNA, 276 bp, Staphylococcus epidermidis; identical to SEQ ID NO: 4628

SEQ ID NO: 7730 - DNA, 624 bp, Staphylococcus epidermidis; identical to SEQ ID NO: 4627

SEQ ID NO: 7731 - DNA, 663 bp, Staphylococcus epidermidis
atgaccaaaggaatcttaggaagaaaaattgggatgacacaagttttcggtgaaaacggtgaattaatccctgtaacagttgtagaagctagtcaaaacgttgtattacaaaagaaaactgaagaagttgatggttataatgctatccaagtaggttttgaagataaacaagcatataagaaaggttctaaatctaataaatatgctaataaaccagctgaaggtcatgctaaaaaagctgacacagcacctaagcgcttcattcgtgaattccgcaacgttaacgttgacgaatacgaagtaggtcaagaagtctcagttgatacattcgaaactggtgacatcattgatgttacaggcgtttcaaaaggtaaaggtttccaaggtgctattaaacgtcatggacaaggtcgtggaccaatggctcacggttctcatttccatagagcgccaggctctgtaggtatggcatcagacgcttcaaaagtgtttaaaggacaaaaaatgccaggacgtatgggtggaaacactgttactgttcaaaacttagaagtcgttcaagttgacactgaaaatagtgtgattttagtaaaaggcaatgtacctggacctaaaaaaggtttagtagaaatcacaacttcaataaaaaaaggtaataaataa

SEQ ID NO: 7732 - DNA, 309 bp, Staphylococcus epidermidis; identical to SEQ ID NO: 4625

SEQ ID NO: 7733 - DNA, 399 bp, Staphylococcus epidermidis; identical to SEQ ID NO: 4624

SEQ ID NO: 7734 - DNA, 186 bp, Staphylococcus epidermidis
atgccaatcattaatgtgaaattattagaaggccgttctgatgaacaacttaaggatttagttacagaagtcactcatgctgtagaaaaaactacaggtgcaaataaagaagcgattcacgtggtcattgaagaaatgagaaaagatcattatgctgtcggtggcgtaagaaaatctgatcagtaa

SEQ ID NO: 7735 - DNA, 1263 bp, Staphylococcus epidermidis
atgtatgattacaatttattagaagatagggatgtactctgcatagaccaaaaaagtttttttgcgagtgtatcatgtatggaaaaaggattggacccattaacaactaaactagcagttgtagcagatacgaaaaggcaaggttcggtcgttctagcagcaactccaaagttaaaagaattaggtattaaaacgggatcaagactttttgagataccacatcgtaatgacatttatattattaatccaagtatgagaaagtatttaaatgtatctgttgcaatttcaaagattgcactgcggtacgttccacctgaagatttacatcagtatagtattgatgaatttttcatggatgtaacggatagttaccatagatttaattcaacagtttttgctttttgtaaaagatttcaaaatgaaatattagaagaaacaggtattcactgtaccattggaataggctcgaatatgctattgagcaaggttgcaatggatattgaagctaagcattcggaaaacggtatagctgaatggcgttatcaagatgtacctgaaaaattatggccaattcaaccacttagagatttttgggggattaataagcgtacagaaaagaaattgaataaaagaggaatatttacaataggagatttagcaaagtatccatatcattatttaaaaagagattttggagttttaggtatagatatgcatctacatgcaaacggtattgatcaaagtaaagtaagagaaaaatataaagtaacaaatccttcaatatgtaaaagtcagattctaatgcgagattatcaatttgaagaatccaaagttgtcatgcaagaattgatagaagatgtagcaagtcgtttaagagcagaaaagaagcttgctcgaacaattcatttttctttcggttatgctgaaggtggtggcatacataagcaatatactttggaggatcctacaaatttagaaagagatatattcaaagtcattaattattttgcaaatcgtctgtgtgacaaaaaagcattgtatagaacgttaagtgtatcgttaactcagtttattaaagaaagcgatcgacaactcaacttattcattgatgaatatgaacgtaagaaagatgtaaaacttgctaaaaccattgatcacttacatttaaaatatggaaaaggaattgtgtcaaaagcgacttcatacaccgaagctggtacaaagcatggtcgattaggactaatggctggtcataaaatgtag

SEQ ID NO: 7736 - DNA, 1089 bp, Staphylococcus epidermidis
atgcgaaatattttatttgtagggttaggccttattggcggtagcttggcgagtaatttaaaatatcattacagtaatttcaatattcttgcatacgattcggactacacacaacttgatgaagccctttctataggtattattgatcaaaaagttaatgattatgctactgctgttgagatagcggatataatcatctttgcaactcctgttgagcaaacaattaaatatctatctgaacttacaaattacaatacaaaaactcatttgattgtaacagacacaggtagtaccaaacttactatacaatcattcgaaaaagaattattaaaacatgatattcatttaattagtggtcatcctatggcaggaagtcataaatctggtgttttaaacgcgaaaaaacatttatttgaaaatgcttattacattcttgtatttaatgaaatcgaaaataatgaagccgcgacatatttaaagaaattacttaaacctacgttagcaaaatttatcgttactcatgcaaatgaacatgatttcgtaaccggtatagtgagtcatgttccacatatcatcgcttcaattttagttcatctaagtgctaatcatgtcaaagaccattctttaatcgaaaaattagcagccggtggctttagagatataactcgtatagcaagtagtaatgctcagatgtggaaggatatcactttaaataatcaaaatcatattttatctttacttaacgagattaaagaacaaattactggtattgaaaatttgatacgagaacaaaatagtaatagtatttacgatttcttcgttaaagctaaagattatcgtgatcaacttcctgttaaacaacacggtgcaatatctactgcgtatgatctttatgttgatatccctgataagccgggtatgataagtcaaattacaaacatcataagttcacataatatttctattataaacttaaagattttagaagtacgggaagatatttatggagctttacaaatcagttttaaaagtcccgaagatcgagagaatgctataaaagccctcgcaaattttgatacttattattaa

SEQ ID NO: 7737 - DNA, 1407 bp, Staphylococcus epidermidis
atggatattgtatacaaaaaggtgaatgctcaaattacgccagaagctttagcaaaattaaaacaaaaaaagatcatttttgaaagtacaaatcaacagaaacttaaaggtaggtactcgatagtagtattcgatcattatggcaaaattacattagataattctcaacttttaattaagttagacaatcattgtgaaatagttaagaatcaaccgtatcaacgacttaaggaatttgtagataaatattattttgaaatcaaagataaatatttaaaagatttaccttttatttcgggctttatagggacatgtagctttgatttagtacgacatgaatttaaaaaattacaagatattaaattagaagatcatcaaactcatgatgtccaattttatctagtggaagatgtatttgtttttgatcattataaagatgaattatatattatcgcaagtaacttattttcttatagaacaaaagagagattaaaggaatctattgaacgtaaaattgaagatttaaaaaacatacatttttcggttgaggatataaattataaatccatccctcgacatataaccaccaatatatcagagcaacaatttgttcaaactattagaattttaaaaaagaaaattactgaaggagatatgtttcaagtagttccttcaagaatttatagttataaacaccattttcaacacaatttacatcaattaacttttcagttatatcaaaatttaaagcgacaaaatcctagtccatatatgtattatattaataaagatgtaccgattgtaataggaagttctcctgaaagttttgtaaaggtaaaagatggaaaagtttatacgaatcctatagctggaacaattaaaagaggtcaaaataaaaaagaagatgaaaataatgaaaagacattaatgaaagatgaaaaggaattgagtgaacatcgtatgctcgtagatttaggaagaaatgatattcatcgaataagtaaaacaggcacttcacaaattaccaaactaatgacaatagaacgttatgaacatgtcatgcatatcgttagtgaagttattggagaattaaaaccccatctatctcctatgagcgtcatcgcaagtttgctaccaacgggtactgtctcaggtgcacctaaacttagagctatacagagaatatacgaatcttatccttataaaagaggtatctatagcggtggtgttgggtatatcaactgtaatcatcatttagattttgcattggctatacgtaccatgattatcgatgaggaaaaagtcagtgtcgaggcaggatgtggagtagtatatgattctattccagagaaagaacttgaagaaacaaaacttaaagctaaaagtttattggaggtaactccatga

SEQ ID NO: 7738 - DNA, 567 bp, Staphylococcus epidermidis; identical to SEQ ID NO: 3170

SEQ ID NO: 7739 - DNA, 996 bp, Staphylococcus epidermidis; identical to SEQ ID NO: 3171

SEQ ID NO: 7740 - DNA, 789 bp, Staphylococcus epidermidis; identical to SEQ ID NO: 3172

SEQ ID NO: 7741 - DNA, 624 bp, Staphylococcus epidermidis; identical to SEQ ID NO: 3173

SEQ ID NO: 7742 - DNA, 1209 bp, Staphylococcus epidermidis; identical to SEQ ID NO: 3174

SEQ ID NO: 7743 - DNA, 732 bp, Staphylococcus epidermidis; identical to SEQ ID NO: 3175

SEQ ID NO: 7744 - DNA, 660 bp, Staphylococcus epidermidis; identical to SEQ ID NO: 3176

SEQ ID NO: 7745 - DNA, 123 bp, Staphylococcus epidermidis
atgaaccaaatgttaaatataaaaggtgaagtaaaacgacctatttttctaaaaataaaaagaaatagatataaagatataaatgggagttatgaagatgaagtttacgaatttgacagctaa

SEQ ID NO: 7746 - DNA, 1254 bp, Staphylococcus epidermidis; identical to SEQ ID NO: 5902

SEQ ID NO: 7747 - DNA, 1254 bp, Staphylococcus epidermidis; identical to SEQ ID NO: 5901

SEQ ID NO: 7748 - DNA, 765 bp, Staphylococcus epidermidis
atgaattttatttttgatattgatggtacgatttgttttgatggatgttccatcgattcatctattaagcaacgacttttcaagctacgtcaagctaatcacaatgtaatatttgcttcagcacgtcccattagagacttgcttccagtcattcctgaatttgcggatgataccttgattggtggtaatggctcaattatctctaaaaatggacaaatcgaaattgtttcggtaatcaatgagcatgatatcagtctaattaaaaaaattataaagaaatatcaattatcatacatcattgatgataaatttaattatgcttcaaatttggatagtaataatgaactgtatcaacgcattgatcctgatggtaaagcacaatctctagatatggatgagattcgaaatcctataaaagcaattctattaaatatagataacaaagattttgacatgattgctcatcaattagtaagtcagtctcatggtattgaattaattcgtcattacagtgagtcctatattgatgtaacggcacgtggcgttgataagtatactactattcaatatattttaggaactaatagtgattatatcgcttttggtaatgatcacaatgatgttcatatgcttgaacatgcgagccaaggttattttgtgactaatcaatttatagaacacacatcattttttaaaaataaaaatattacagttattgatgacacaatatatgcaatatgtgaggttttagatcgatatctgtaa

SEQ ID NO: 7749 - DNA, 699 bp, Staphylococcus epidermidis
atgattcaatttgatcatgtagattattcatatcatcgaaaacagcctgttttaaaagatattaatataagtattcaacgtggtgaaaaaataggggttttaggggaaagcggtgctggaaaaagtactattggttctttaatattaggtcaattaaagccaacaaaaggaaaaataagtatcgattcaggaaaggttctacctatttttcaacatgcgacagaaagttttgatcgtcaattcacgattgaacagtcattgagagagccacttttattttatcgacaattaataccacaaaacatcaaaaatatcattcttaactatttaattgaatttaatttgtctacagatctaataacaaagtttcctcaagaagtaagtggtgggcaactacaaagattaaatattatacgctctctcttagcacaaccagatatattggtttgtgatgaaataacttcgaacttagacgtcatggccgaacaaaatgtaatcaatattttacttaacgaaaaaaacattcaaaataaaacattaatcgtcatctcgcatgatttatctgttttacaaaggttaacgaataggataatagttatcaaagacggtcaaatagtagatgattttaaaagtaaagatttatttagccatcaaagacatccatatacaaaactattaattcaaacgtatgaatattga

SEQ ID NO: 7750 - DNA, 777 bp, Staphylococcus epidermidis
ttgaaacttttaacaataaaaaatctaaacatcagtgataaagaagggcaagcaattattaaaaatgtcgacttaaatatatataatcaatctctaaatgtcattataggtgaaagtggtgctggaaaaagtttgactgttaaagcaatattaaatcatttacctactcagttacatatgagtttcgatgaatttaaaatgcaaggtcaaaatacttctggtatcaagcaacttttaggtaaacatatcggctatatctctcaaaattatgctcaaagttttaatgaatatactcggttagataaacaacttatagctatctatcgttatcattttaatgtttctaaggataatgcattgaaaaagataaaaaaagctttaacttgggttaacttaaatgatgaatcaatcattaataaatatagtttccaactttctggaggacaattagagcgagttaatattgctagcgttttaatgttagatccagaattaattattgcagatgaacctgttgcatctttagatgtagtgaacggtcatcaaataatgcaacttcttcaacacattgttaaagatcatcataatactgtattacttatcactcataacatgaatcatgtcctcaaatatgctgattattttaatgtaatgagaaatggcatgatgattgaatctggagaaatagacaaattatttaatcaccatcatcttcatcggtatacagaacaattattaaactatagaagcaagctgcaaaaggaggacaacatctaa

SEQ ID NO: 7751 - DNA, 720 bp, Staphylococcus epidermidis
atgagtatgaatcatttacttggcacagatgattacggacgtgatttattcagtcgtttagtcgtgggctctcgtgcaacattgtttgttacactacttactttacttttcactgtagtggttggagtacctttagggttacttgcaggctataaaaaaggttggattgatacgattatcatgcgaattattgatataggattaagcataccagaattcgttattatgattgccttagcaagtttttttcatcctagtctttggaatttagtaatagctattacaatcataaaatggatgaattatactcgcgtgacaagagggattgtcaataccgaaatgaatcaatcgtatatacagatggcacaattttttaatgtctcaactttgaatatcttatttaaacacttattaccaaaagttttaccatctatatttgttattatgatagttgattttggaaaaatcattttatacattagttcattatcatttttaggtttaggtgcacaaccaccatctccagagtggggggcaatgttacaagcagggcgtgaatttattacttcacatcctatcatgattatagctccagcatctttgatatcaggtacaatattgatatttaatttaactggtgatgcagtaagagatcgtttattagaacaaagaggtgtaaaagttgaaacttttaacaataaaaaatctaaacatcagtga

SEQ ID NO: 7752 - DNA, 1002 bp, Staphylococcus epidermidis
atgtttaaaatgataatttataaactttcacaaatgattgtcgtactatttatattaactacaatcacatttatattaatgaaactctctccaggtaatcctgtagacaaaattttacatcttgatatttcgcatgtatctaatgagcaaatagaaacgacagagaataagcttggcttaaatgatcctatttttattcaatggtgggactggttaaatcaattgtttcattttgatttaggaacaagttatcaaacaagcgagcctgtaattaaggaaatagcaaattatcttggtcctacacttattattacttttggtacgcttatagtgtcattagttatttcaataccattagggattatagcagcagtttactaccataaagtttgggataggataatccgtgttatgacatcattatccgtaagcctaccatcattttttatcggtcttatcttattatatatatttagcttgaagttgaatattttaccaacttcagatgaggggcgtttcacttcatatattttaccaataattaccatgagtattggaatgtgtgcttattatattcgatttattcgttctactttattagaacaatatcaaacacctatagttgaatcgtctcgtctcagaggtatgcccgaaagatatatactttttcaagatatccttaaacctacgatactaccaatcatacctctattaggattatccattggtagtttgataggtggaacagtagtcattgaaaatttatttgatattcctgggttaggctattttttagttgacagtataaagtcgagagattatccagtcattcaaggttgtgtattatttattggtttctttgttgtgattataaacacaattgcagatttactttcattacttatcgatcctaaacaacgttatgctattactcagaaagaaacatcaaagtttaaatggtttaattcacatagaaaagaaggtcgtaacgatgaagtttaa

SEQ ID NO: 7753 - DNA, 339 bp, Staphylococcus epidermidis; identical to SEQ ID NO: 5894

SEQ ID NO: 7754 - DNA, 1812 bp, Staphylococcus epidermidis
atgagtgaaggtttacctttgagagaagaagttccggtaaaagaaacttgggatttgaaagatttatttacaagtgatcaagcattctatcaaacattggaacaagtagtacaaatgtctttagattttaatcatacatattatcagaaacttaataacatagaaacaatagaaaaggcattagatgaatatgaaaggatacttatagaaatagatcgtttatataattatccagaacttagattaagcgttgatacgtctaatgaagaagcacaaaaagttaacgcaaaacttaatacgacttctggaaaacttgctggtttattatcttttgttgattccgagattttggagttacccgatgagataataagcgaattgaggtctcaaacaaaataccctcattttattaaacaacttcaagatcgtaagccttatcaattatctgctgatgttgaaaaagtattagctacattaacaccaacattgagaagtccgtttgaattgtatggtactacaaagagtttggatattaattttgaatcgtttgattatgagggtgttacctatccattggattatgcaacatttgaaaatgaatatgaagatcatccatctcctgaatttagacgtaaaagttttagagcttttagtgatgcattacgacaatatcaacatacgacggccgcaacatataatatgcaagtccaacaagaaaagattgaagcggatttacgaggatatgattctgttattgattatctactacaagatcaagaagtaacaaaagatatgttcgatagacaaattgatgtcattatgagtgatttagccccagttatgcaaaagtatgcaaaaattattcaacgtgtacataacctggataaaatgcgatttgaggatttaaaaatttcaatagaccctaactttgaaccagaaatatcaattgaagaatcgaaaaaatacatttatggagcgctcaaagtacttggtgatgattatgtcaaaatgttagagtctgcctatgattaccgttggattgattttgctcagaataaaggaaaagatactggagcatattgtgcaagtccatacattacacattcatatgtatttatttcatggactgggaaaatggctgaaacattcgttcttgcgcatgaattaggacatgcaggtcattttacattagcgcagaatcatcaaaatttgttggaatctgaagcgtctatgtattttgtagaagcaccttccacaatgaatgaaatgttgatggcaaattacttatttaatagtagtaataatcctcgatttaaacgttgggttattggttcgattttatctcgaacttattatcataatatggttacccaccttttagaagcagcttatcaacgtgaagtgtatagccgagtcgacaatggagagtcattaactgccccactgctaaatgaaataatgttgaacacttataaagcatttttcggtgacactgttgaaatgacagatggggttgaattaacatggatgagacaaccacattattatatgggattgtactcatatacgtactctgctggattgacaattggtacagttgtatcacaatgtatcaagaaagaaggtcaacctgctgttgatcgctggttaaaaacgctacaagctggtggtagtcaatctccaattgaattggcgcaaatagctggcgttgatattacgactgacgcccctttaaaagagacaattaactatatttcaaatttagtagatgaattagaagtattaacatatcaaatagaagaaaattcataa

SEQ ID NO: 7755 - DNA, 648 bp, Staphylococcus epidermidis; identical to SEQ ID NO: 3188

SEQ ID NO: 7756 - DNA, 876 bp, Staphylococcus epidermidis; identical to SEQ ID NO: 3189

SEQ ID NO: 7757 - DNA, 906 bp, Staphylococcus epidermidis; identical to SEQ ID NO: 3190

SEQ ID NO: 7758 - DNA, 927 bp, Staphylococcus epidermidis; identical to SEQ ID NO: 3191

SEQ ID NO: 7759 - DNA, 978 bp, Staphylococcus epidermidis; identical to SEQ ID NO: 3192

SEQ ID NO: 7760 - DNA, 897 bp, Staphylococcus epidermidis
atggcactagataaagatatagtaggttcaatagaatttttagaagtcgtaggattacaagggtcaacatatttacttaaagggccaaatggtgaaagtgtcaaactcaatcagtcagaagttgctgatgaagataattttgaattaggtgaggaatatagttttttcgtttatccaaaccgttcaggagatttatttgcgacgcaaaacatgcctgatattacaaaagataaatatgattttgctaaagttataaaaaccgatagagacggtgcacatattgacgtaggacttcctcgtgaagtcttagttccatgggaagatttaccgaaacttaaagaactttggcctaaagcaggtgattacttgctagttactttgagaatagacagtacgaatcaaatgtttggacgattagctagcgaaacgattgttgagtcaatgttcaccccagtaaatgacgatagcaaacaaaacgaatatatttctgcacgcgcttatagattactcagagtaggtagcttcttattaagtaatgagggttataaaatctttgttcacgaatctgaacgtaaacatgagcctcggttaggtgaggcagtagaggtccgaattataggtcataatgaaaaaggtgaattaaatggttcgtttttaccattagctcatgaacgccttgatgatgatggacaggtcatatttgatttacttgttgagtatgatggtgaattacctttttgggataaatctagtcctgatgcaatcaaagaagtctttaatatgagtaaaggctcgtttaaacgtgcaatcggacatttatataagaaaaagataatcaatatagaaacaggaaaaatcactcttaccaaaaaagggtggagccgtgtagatgattaa

SEQ ID NO: 7761 - DNA, 1608 bp, Staphylococcus epidermidis; identical to SEQ ID NO: 3194

SEQ ID NO: 7762 - DNA, 1203 bp, Staphylococcus epidermidis
ttgaatagaagtgttttaaaatttggcggttcttccgtcagtgattttaaaaaaataaaaaatatcgctgaaatgcttaaaacacgcattgaagatggtgaagaattaatcgttgttgtcagtgctatgggtaagacaactgatcaattgatgaataatgtatcaagtcttacttctacccctaaagatcaagaacttgcattgctattaacaacgggtgaacaacaaacggtttcttacctttctatggtactcaatgatataggtgtaaatgctaaagcgatgacaggttatcaagctggcattaagactgtaggacatcacttaaaaagtaaaatagcagaaattaatcctaatatttttaatgaggcttttaaaaatcatgacattttagttgtagctgggtttcaaggtataaatgaagatttcgaacttactacacttggacgaggtggttctgatacaacagctgtagctttagcagcaagtaatcagacaccttgtgaaatttacactgacgttgatggtgtgtatgcaacagatcctagaatacataatgaagcgaagcgtttagaatatgtctcttatgaggaaatgatggaaatgagcgcgcttggtgcaggtgtacttgaaacgagaagtgttgaattagctaagaattatgatattccactttacttaggaagaacgttatcaaatgtgaaaggaacatggattatgtctaaaagtgatttattagagaaaaaagcagtaactggtgtcgcattggatacacacatgatgcacgtcacgataagttatcccctaccggataatcagttactgacacaattgtttaccgcattggaagaagaatctgtaaatgttgatatgatttctcaaattgtaaatttagaaggtttacaattatctttttcaattaaagatagtgatgcacatcaaatttcttcaattctggaaaatttatcaacacacttttcagcacttgattataaaattaatgaagcatatgtcaaaatatctttaattggatcaggtatgagagatatgtcaggagtagcatcaaaagcttttacgacacttatcaattcagatattccattttatcaaacgacgacatcggaaattagcatttcttatgtaatagacgaagaaaatggtgaaaaagcagtagaagaattgtatcatgccttcgaaatttag

SEQ ID NO: 7763 - DNA, 990 bp, Staphylococcus epidermidis
atgacaagattagcagtagccggagcaaccggattagttggaacaaaaatgttagagacactagatcgaaaacaaataccttttgatgaattagtattattttcttctgctcgctcagcaggaaaaaaagttgaatttcaaggacaattgtatactgttcaagaattaactgatgaagcagcaagtgaacattttgattatgttttaatgagtgcaggaggtagcacaagtgagcactttgctccactatttgaagcggctggagccattgttattgataattctagccaatggagaatggctgaagatgtcgatttaattgttccagaagtgaatgagcctcaatttacacgtggtattattgctaatccaaattgctctacaattcaatcagttgtacctcttaaaattttacaagatgcatatggtttaaaacgtgtcgcttatacgacttatcaagccgtatcaggttctggtgttaaaggtaaaagagatttagctgaaggtgctaatggaaaagaacctgaagcatatccgtatccaatttacaataatgtattaccacatatagatgtttttcttgaaaatgggtatacaaaagaagaacaaaaaatgattgatgaaacgaaaaaaattctcaacgaccaagacttaaaagtgactgccacatgtgtacgtgtaccagtacaagatagtcacagtattgaaatcgatgtgactttaaatcaagacactacagttaaagagatacaagaattatttgcacaagatcaacgtgttgttcttgtagataatccaagtaaaaatgaatatccattagccattcattctactggcaaagatgaagtatttgtaggacgtatccgccgagatgactctcttgaaaatacgttccatgtatggtgtacctctgataatttgctcaagggcgcagcattaaatgcagttcaagtgttagaacaaattttaactttgaaaggagcaagataa

SEQ ID NO: 7764 - DNA, 885 bp, Staphylococcus epidermidis
atgacacacatgtttgaaggcgttggtgtagcattagcgactccctttaccaataatgaggttgatttcaacgcattagaaagacatgttcaatttcttttaaataacaatattcaagcaattatagtgaatggcactacagcagaaagtcctacattaagtgacgaagaaaaagagaaagtattggcgacagtagttaaactcgtgaatcatagcgttcctgttattgcgggtactggcactaataatacgtataaatcaattcaagcttcaatacgtgctaaagaaattggtgcagatgcagtcatgttgattacgccctactacaacaaaacgaatcaacgtggtttaattcaacattttgagacaatcgcaaatgaagtgaaattaccagtaattctttacaatgtgccatcacgaacaaatatgacgatagaaccagaaacagttggaattctcagtcataatccatatatcgttgctttaaaagatgcgacaaatgattttgattattttgatcaagtaaaacaacgtattaatacaaatgaatttgcattatatagtgggaatgacgacaatgttgtgaagttctatcaacgtggaggtaatggtgtcatctctgtaattgcgaatgtaattccacaagaatttcaatatttatatgaccaaagacaaaatgaaaccgatattactaattactttaaacctatcgagaaattgttagaagcgttgtcacttgacgttaacccaatacctattaaagttcttaccgcatatttgggttatggtcactacgaagtgagattaccattagtgcctttagaagaagcacaatgtaaacaagttgaacgagcatttgaacaatttaaagcaggtgaacaataa

SEQ ID NO: 7765 - DNA, 723 bp, Staphylococcus epidermidis; identical to SEQ ID NO: 3198

SEQ ID NO: 7766 - DNA, 723 bp, Staphylococcus epidermidis
atggtacaacatttatcagctcaagaaatcattcaatatattagtgatgctaagaaatcaacaccactcaaagtttatgtaaatggtcattttgaaaatgtcacattcccagaatcttttaaagtttttggctctgaacattcaaaagtaattttctgtgaagcagatgaatggaaacaattttatcaacaaaatcattcattaatcactgaattagaaattgagatggatcgtcgtaattcagctataccgcttaaagatttaacaaacacaaatgctcgtattgagccaggtgcgtttattcgtgagcaagcaatcattgaagatggtgctgtggttatgatgggtgctacgattaatattggagctattgtaggagaaggaacaatgatagacatgaacgcaacacttggtggacgagctacaacaggaaaaaatgttcatgttggtgcaggtgctgttttagctggtgtcattgaacctccaagtgcttccccagttgtcattgaagacaatgttttaattggagcaaatgctgttattcttgaaggtgtacgcgttggtgcaggtgctattgtagcagctggagctattgtaactcaagatgtgccagctggagctgtagttgctggtacgcctgctaaagtaattaaacaaacttcagaagttcaagactcaaaacgtgagattgtgtctgcactgcgtaaattaaataatgaataa

SEQ ID NO: 7767 - DNA, 1152 bp, Staphylococcus epidermidis
atgaacgagttagaattcgttacattgcacagaagacatttacatcagtatccagaattaagtttacatgaatttgaaacgacatcgtatataacatcatttttagaggatttaggcgtaccttacgaccgaccacttaaaactggtgttattgcttatttggaaggtaatagtcaccacactattgcattcagagcagatatagacgcgttaccaatttatgaagaaaatgatattgattttaaaagtaagaatgataatgtcatgcacgcgtgtggtcatgatggtcatacgacagcacttatgctttttgttaaaaggtgtaaagcattgtatgacaaatctgaattacctcataatgtagtgtttatatttcaacctgccgaagaaaccggtggaggagctaatcgtttaatcaaagctggcgcttttgacaagtaccctattgaagcggtgtttggttttcacgttaatccgtttgaaaaagaaggtaaaattgtaattcgagatgaagaaatcactgcaagtgccactgaatatcgcttctttttaaaaggattatctagtcatgttgctgataaggagcaaggtcattcatgtggtgaggggttacagcatgtcttaagtcaaatcggccaaatccaacaatttcatttgaatggattgaaacgtaacattattcatatgggtcattttgaagctggtgaagctattaatacagtaccgagtcatggttatcttggaggtacaattcgtacatatgacacagaagatttagctattgtaaaacaccaaatgcataaaattgcgaaaagtgttcaattattatttaatgttgaatgtgaggttaaatttgaagaaggatatccaccaacaatgaatcatccacaattacgtcaagccgttgagaacgctataaaaggtgcaaatttagaaatagttgaaaaaaaactacccttcctgttcggtgaagattttagtttttatggtcaacaacttgccccttcatattttgtatttgttggtacacaaaacaatgaaaaaggttttgtgactggtcttcatactgcccatcttaattttgatgagaaaatattaattgacgttgtaaattattacgagcatttgttaagaaattataaagaggtgtaa

SEQ ID NO: 7768 - DNA, 1074 bp, Staphylococcus epidermidis
ttgacagcaatttggtcattagacacagaagcattttatcagaatgcagtaaaagtaaaaaataacgaaccaataatggcagttgtaaaaaacaatgcatatcattatggacttgagtttgcagtgaaaacatttttaaaagcggaaattaatacatttagcacaacttcattaaatgaagctatacgagttagaaaaatagcacctgaagcaactatatttttaatgaatcctgtttatgattttgatttagtaaaacgttatgatattcatatgacactcccctctttaaactattattataaatataaacaagatttaaaaggcattcatgtacatttagaatatgaaaatttattacatcgttccggttttagaaatatcgaagaaatacgtgaagttttaaaagatcatgatcaaaataatcaagataaaatgattatttcaggaatatggacgcattttgggtatgcagacgaatttgacgtagatgaatataaaatggaacgtgatgcttggttaaacttgataaatacacttttaaatgaaaattatcattttgatatgatacattcacaaaatagtgcaagttattttcgtgagaatcaaatgttacttcctcatcacactcatgctagagttggaattgccctttatggttcaagaccatatagtcttataaatgaagaacgcattactcaatctttgactgttaaaggtaatgttatacaagttcgtgatgtaaataaaggtgattattgtggatatagtttcgcctttgaagtaaagaatgaccacactcaattagctgttgttgatataggttatggcgatggtattctaaaatcaagagcaaaacacgaagctataattaatggcaagcgatatccaattagagcactaatgatgagtcatatgtttattgaagttgatgacgaagttcatgcacaagacgaagtcatattatataataaggatatacgtatagatgaatttacatttaaaggtgttggcgcaaattcagaacaattaagcgcaatgaatcacgattctcttatgaaggagtatttataa

SEQ ID NO: 7769 - DNA, 1266 bp, Staphylococcus epidermidis
atggtagttaattataatgataatggcgaactgacaatgggaggtacaagcttaaaaactattgcacaaagttttggtacaccttcgattgtttacgatgaagaccaaattcgtaatcagataagaagatatcataaagcatttgaagcaagtggtttaagctacaatatatcttatgcctcaaaagctttcacttgtattcagatggttaaattaattgatgaagaaaatttacaattagatgttgtttctgaaggtgaactttatactgctcttgaagcaggatttgattcgaaacgtattcacttccatgggaacaacaagacgaaacgcgagattcaatatgcattagataatcagattggttattttgtagtggatacgctcgaggaaatagagcttattgataaatatgctgatagtaatgtagatgttgtattacgtgtaaatcctggggttgaagcccatacacatgaatttattcaaactggacaggaagatagtaaatttggattatcaatcaaacacggtctagcattaaatgcagttaataaagtaaaagcaacgaaacatttgcaacttaaaggtatacatttccatattggctctcaaatcgaaggcactgagccgatgattaagacagctaaaattgtgcttaattggttagcaagtgaacgaattgaagtgagtttactaaacataggcggtggtttcggaattaaatatgtcgaaggagatgaaagtttccctattgagcaaggaatatctgaaattactgaagctattaaagaaactgcgcaagcattgcagtacaatattcctgaaattgggatagaacctggccgttcaattgttggagaagcaggtatcactttatatgaggttggtacaattaaagatatccctggagttaataaatatgtatcagttgatggcggaatgagtgatcacatacgaactgcactttatggtgcacagtatgaggcgttgttagttaacagaaatgaaaaagctaatgaatctgtaacaattgcaggtaaactctgtgaatctggtgatattatcgtacgagatgccccattaccctcttctgttcatagaggtgattacctagcaatactttctactggtgcgtatcattattcaatggcttcaaattataatcaaatgcaaaaacctccagtatttttcttgaaagatggaaaagcacgtgaagtgattaaacgtcaatcattgagacagttaattattaatgatacgaaataa

SEQ ID NO: 7770 - DNA, 750 bp, Staphylococcus epidermidis
atgtttaaatttaacttcttttatatttcaaagattcgtgcaacttggatgctttacctcattgggatttatcctctcttgatattcctagctgaattacttaatagtaattttctttcattatcagcaactcataagaatagtgtaagctttttagaattatttatcgcaatatatgatactcaacaaaaagtaatgctatcacttataattattggatatttatcttctttattattttatagcgaaattagcacaggaagactattgttttataaggatcaaagtcgctacaaaatttttaattctaaattaacatctattatttctagttactttatattcttattcattttattattatcaacgttagtagtttatttgttttatgttaacaaccatgaatattcatctcattcttttatgttaaataactcagaattaaatcatactctaatcttaaatcttcttggaatctttttaactgatttattcttaattttctatgttgttattttttctgtgaaatttaattctgggataactattattagtatgattttatgttacgtggtcataaagattacagacaatattaataaaatcaagttttccccttcaaatttcacaaatttagataccgataaaagttttattttcaacttatcaataatgagctctattactattgtttatatattcattatttacctcttagcaattacgattttcagaaaaattcaattttaa

SEQ ID NO: 7771 - DNA, 864 bp, Staphylococcus epidermidis
atgctagaatttagaaatgtgtataaatcttttaagaagaaagaagtattatgtgatgttaattacaaattatctgctggagaaaaggttggtcttataggttctaatgggtctggaaaatcaacattaatgaaacttatagctaaaactcaattaccatctaaaggaaatgtttattttaacaatatagatatacataaatctcacaatatgataaaagatttttctttcatgataggacaaatatattatcctgagttaaatgcaagacaaaatattgaaaattacctaaaaattaataataagattagctatataagtgaaattcaaaagatgctaaacattgtaggtttagaagatattgaaaagaaggttaaaaattattcgtatggaatgaaacaaagactttgtttagctatttgtttaattaccaaaccaaaagtagctgtattagacgagccattcttaggtttagatccgcttggggtaagggaattaaataatatcactgagaaatattcaaaagaaaaaaacactttatttttaatatctagtcaccagttaaaagaattagaagatctttgtgatagatttctattactcgaaaaccatcaaattagagaaattgacttacataatagaatattcactcaaaagttaatattcaaaaatactttaaacaatgctccagaactaaaggctaatttcaatttcattaaaaaaattgatagcaattcaataacaattataaataaagatgaagaagtagatcttacaaatttacttaatttagtaggtaaaaatcccttaataaaaattgaaagtaatgataatctattatcttcatatttctataaagagtag

SEQ ID NO: 7772 - DNA, 411 bp, Staphylococcus epidermidis; identical to SEQ ID NO: 3205

SEQ ID NO: 7773 - DNA, 201 bp, Staphylococcus epidermidis; identical to SEQ ID NO: 3206

SEQ ID NO: 7774 - DNA, 270 bp, Staphylococcus epidermidis; identical to SEQ ID NO: 4889

SEQ ID NO: 7775 - DNA, 591 bp, Staphylococcus epidermidis; identical to SEQ ID NO: 4888

SEQ ID NO: 7776 - DNA, 1131 bp, Staphylococcus epidermidis; identical to SEQ ID NO: 4887

SEQ ID NO: 7777 - DNA, 1344 bp, Staphylococcus epidermidis
atgaataaaaatacgtggattataggctttactttattcgctatgttctttggcgcaggtaaccttatatttccaacacaacttggactcgaaagtggtcatttcttttggccagccatactagcctttgcacttacgggtattggattaccgcttcttggcgttgtggtaggcgcacttgataaacatggttatattgggtcttttaataaaatatcaccacgattttcgttaatctttttaattatcatatatctcactataggaccattatttgcgataccacgtacagcttcaacttcatttgaaatgactgtgactcctattgcacataatagtgggaatttagcattatttatttttacagtaatctattttttaatcgttctttatttatgcttgaatcctaataagatgatagatcgaattggttcattacttacacctttattacttattaccattgtcgctatgattattaaaggttttgtagattttagtggacattcttcaaattacggaatgacaaatgcttatcattccaatttaagtggattttcacaaggatttacacaaggttaccttacaatggatgctatcgcttcaattgcattttcaatgattgttgttaatgcgattaaaacaacaggaatacagcatgctgataaaatctttaaacagaccattattgctggtctcatcgctgcaatcgcattagtatttatatatatttcgctagggtacataggcaatcatattaatattccttcagacactctaaaggaattgaaagctaaagatcaaaatatagggacgtatttactcacaacaatggcaacgaagggctttggaactttcggaaaatacttacttggtattatcgtatcattagcatgtttaactactgcttgtggattaattgtatcagtaagtgaatatttccacagaatactacctaagataccttataaagtatttgtgatatttttcattttagttagtttcattctagctaaccaaggacttaattccgtaattaaaatgtcagtccctgtactcagtgtaatctatccagtggctattacagttattttgttaatactcattgctcgcttcatacctacaaaacgtattgcacaacaaataccgctaattattgtagcaattgaatcaatcttaagcttaataacgacacaagggtggatacgtatttcatttatagatggtttacctttaaaagaatattcacttgaatggttcccaattgctgttgtagcaactcttgttggttatatgattagttattttgttaaacaatctaacattgtatatcaaaaagaataa

SEQ ID NO: 7778 - DNA, 1890 bp, Staphylococcus epidermidis
atgagtgatcgttttataaaattcaacgatgaacaattagatgcaaaacaagtaatgatgttacaagacttagcacgtttacttttaaaaaatgagcaaacgcaagttaaaatacaaaaattcccttactataatccttatagtaatacactcattgcgagttggttttggtctcatagaccgaaacatattgaacaagctggactaaaaacagatgtcttactcgcaacgtatggatatctgaatatggatctttcaatcatcaatcaagttttacacaacaacgattttgaacaccctaagttctttcatcaattatttaaacttttagaggacgtacgtatatttgaacatattagacaacaaagacctagtactacaaaaatgattgatttacgcatagaaacacgattatcttttacagaatctcaaattaatttctacaaaactaaaactgtatatactgatttactttttctttatttagaacatgcatttttaagtcaaaacttttttaatattccatccatacatccagcatttgatgatattttagttcatatgtatcagtacttaccaaatatttttcagaatcaaacatcagaagataatatgtatttagcagaacgtattatgtatcaagtggatgatttattaaaggaagatatgctaaatgaatattactacttacctcaaaaattatatgaagatatttatgcagatagttttgaagacttaaagcgtacagatgcgagcaatactgatggtaaagataatcaacagacagacgaagatgtagaaacagctgaagctgaaacaaaagccgcagacagtgagtctaaaggcggggcatatttagaaatggagctacatgagggtgaaaacagtgaagttatggctgataatgatacggctcgagaaggcgacagcactgatgatatgactgatatgatgaccaaaaaaggaaaagggtcagaaaatacacttgatcatgatgaaggtggatttataggacaaaaccaagcttttgctttaaaaggcattaataaagacgtaagtattgaatggaatatccctgatattacacctcaaaatgtgatagattatcaatattcaaaaaatgatgtacagtttgaaattaaagatttaatacaaattatcaaaaagaccatcgacagagaacatgaagatgaaagacataatttaacaaagggccgtttacaaaaagaccttattaattggtttattgatgatcaatttaagttattttacaaaaaacaggatttaagtaagacattcgatgcaacatttaccttactcattgatgcatcagcgagtatgcacgataaaatggatgaaacgattaaaggtgtcgtcttgttccatgaaacattaaaatctttgaatattaaacatgaaatactagcatttaatgaagatgcttttgaagctgaccaacgtcaacaaccaaatatcattgatgaaatcattaattataattactctatctttgaaaaagaaggcccacgtatcatgacattagaacctcaagatgataatcgtgacggcgtagctatcagaattgcgagcgagcgtttattacaaagaagtcatgaacaacgctttttaatcgtattctcagatggtgaaccgtctgcatttaattacagtcaagatggtattttagatacgtatgaagctgttgaacgtgcgcgtaaatttggtatagaagtatttaatgtctttcttagccaagagccaattactgaagacattgaacaaaccattcataacatatatggccaatttgctttatttgtagaaggtgtggaacatttaccgagtcacttatcaccattactaaaaaaattgttacttaaatctttataa

SEQ ID NO: 7779 - DNA, 792 bp, Staphylococcus epidermidis
atggtacaaacagtttacaaaaattcagatcaaacagtttttgaagatgctaaagctttatttcaattaaataagaatatactactaaaagggccaacaggctcaggaaaaaccaagcttgccgaaacgttaagtcatgttatgaaattgcctatgcaccaagttaattgttcagtagatctagatactgaaagcttattaggttttaaaacaattcaaactaatgaagaaggtcaccaagaaattgtcttcatagacggtcctgtaataaaagcaatgaaagaaggtcacattttatatatagatgaaattaatatggcaaaaccggaaacattacctatacttaacggtgtattagattatcgacgtcaattgacaaatccttatactggtgaagtgattaaagcagcacctggatttaatgtaattgctgctataaacgaaggttatgtaggaacattaccaatgaacgaggctttaaaaaatagatttatcgtcatagaagtagattatatcgatggtgacattcttaaaacagtcattaaagagcaaagtaaattacaagatgaacaattgattcaagatattgttaaatttaatgaagatttacgtactatgaccaaacaaggtcaaatttctgaagaggctgcaagtattcgagctttaatcgaccttagtgatttagcaactgtcatgcctattgaacgtgctgtacaacgtacaattattgataaattagaggatgagcgagaacaacaagcgatacttaacgctatcgagctcaatttttaa

SEQ ID NO: 7780 - DNA, 204 bp, Staphylococcus epidermidis; identical to SEQ ID NO: 3213

SEQ ID NO: 7781 - DNA, 810 bp, Staphylococcus epidermidis
atgagtggacttagaagtgtcactttaggaacaaacgatttatctaaaacgaaagaattatttaaccacatcattggtttacaacattcaactaaaaatgaacatgccataagatttggtgacgctaatttaagtcctggaacgcgtgttcactttgttgaagttccagaggaagattataaaaatctacacatagatagcgttggacttagaacaccttctgattctggattagtagaatatcaaaatatttttgacaagtttaatatatcctatagttcaatcactgaacttaatggtcttaaacattttacttttgaagatcataatcaacaaaaatttgatatttattctaacgagttaaatacgggtataggattaggtatgcctgcttttgatagtcctgttaaccctttacatcaagttcaaggcttaggtccagtcattattaaggtgaacgagttatctgtcaccacttcaattctcacacaagtatttcaattagatttatttgctgagtatcttccacatgaagatgcccaacaacctattcaagtgtttcgtataggtgagggtggtcttggtggtgaaatccacttatttgaaagcgatgaagatattcaaatgaatacacacgggccaattgagcaagtggaattctctacaaatgatacccaattgtatcttcaagcaaaaaatcgtttagatgagattggtgttccatatcaaactctcgaacaggatacttcagaatctcttagaatcactgaaaatagtggcatttcatttatttatacacttgaaaagtaa

SEQ ID NO: 7782 - DNA, 174 bp, Staphylococcus epidermidis; identical to SEQ ID NO: 4881

SEQ ID NO: 7783 - DNA, 1263 bp, Staphylococcus epidermidis
atggcagaggtaaaagttccagaattagcagaatcaatcacagagggtaccattgcagaatggttaaaaaatgtaggcgataatgtagataaaggtgaagctatcttagaactagaaacagataaagttaacgtcgaagtagtttctgaagaagctggggtattatcagaacaattagccgaggaaggcgatacagttgaagtaggtcaagctgtagctgtagtaggagaaggacaagtaaacacatctaacgatagttctaacgaatcttcacaaaaagatgaagctaaagagaaagaaacgccaaaacaatctaatccgaattctagtgaaagtgaaaatacacaagataatagccagcaacgtatcaatgcaacaccatctgcacgtcgacatgcgcgtaaaaatggcgttgatttaagcgaagtatccggaaaaggcaatgatgttctaagaaaagatgatgttgaaaatagtcaaaaatcttcaagtcaaacagctaaaagtgaaagcaaatcacaaaacagtggttctaaacaatctaataacaatccatcaaaacctgttattcgtgaaaaaatgtctcgacgcaaaaaaactgctgcaaaaaaattattagaagtatcaaatcaaacagctatgcttactacatttaatgaagttgatatgacaaacgttatggatttacgtaaacgtaaaaaagaacaatttatcaaagatcatgatggtactaaattaggatttatgtccttctttactaaagctgccgttgcagctctcaaaaaatatcctgaagtaaatgctgagatagatggcgatgatatgattactaaacaattttacgatattggcattgcagtatccactgacgatggattactcgtaccatttgttagagattgtgataagaaaaattttgcagaaattgaacaagaaatcgctaatttagccgtaaaagctcgtgataaaaaattaggccttgatgacatggttaacggttcgtttaccatcactaatggcggtatctttggctcaatgatgagtacaccgattataaatggtaatcaagcagctatcttaggtatgcattcaattattacacgcccaattgcagttgataaagatacaattgaaaatcgtccaatgatgtatatcgcattaagctatgatcatagaatcatcgatgggaaagaggctgtaggattcttaaaaacaatcaaagaactcattgaaaaccctgaagatttattacttgaatcataa

SEQ ID NO: 7784 - DNA, 2805 bp, Staphylococcus epidermidis
atgactaagaacaagaaagaatttacagaggctcctgtaaacttcggcgcaaatcttggccttatgctagatttgtatgatgattatctacaagatccatcatccgtacctgaagatttacaagtcttgttcagtacaattaaaacaggtgaagctcatatcgaagctaaacctaccactgatgggggtggttcacaagcgggagatagcacaattaaacgtgttatgcgcttaatcgataatattcgtcaatacggacatttaaaagcagatatttatccagtaaatcctccagagcgtcaaaatgttcctaaattggaaatcgaagattttgatttagataaagaaactttggaaaaaatatcatctggaattgtctctgaacattttaaagacatttatgacaatgcctatgatgcaattgttcgtatggaaagacgttacaaaggaccgatagcttttgaatacactcacattaataataataaagaacgtgtgtggttaaaaagaagaattgaaacgccttataaagcaagtttaaacgataatcaaaaaaaagaacttttcaaaaaactcgcacacgtagaaggttttgaaaaatatttgcacaaaaattttgttggggctaaacgtttttcaattgaaggcgtcgacacattagttccaatgcttcaacacacaatcacattagcaggtaacgaggggattaaaaacattcaaatcggtatggctcaccgtggacgtttaaatgtattaacgcatgtcttggaaaaaccttatgagatgatgatttcagaatttatgcatacagatccaatgaagtttttacctgaagatggtagtttagaattaacctcaggttggacttcagatgtgaagtatcacctaggtggcgttaaaacgactaactcatacggaatagaacagcgtatttctttagcgaataatccaagtcatttagaaatcgttgcacccgttgttgctggtaaaacaagagcagcccaagataatacacatcaagtaggagctccatctaccgacttccataaagcaatgccgattattatacatggtgatgcggcatatcctggtcaaggtattaattttgaaacgatgaacttaggtagtttaaaaggatattctacaggtggttcacttcatattattacaaataatagaatcggttttacaactgaacctattgatggacgttcaacaacgtactcttccgacgtagctaaaggttacgatgttccaatactacatgtaaatgccgatgatgtagaagcaacaattgaagctattgaaattgcaatggaattccgtaaagaatttcataaagatgtcgttattgacttagtaggttatcgtcgctatgggcacaatgaaatggatgaaccttctattactaatccagttccataccaaaacattagaaaacatgattcagttgaaattttatatggtaaaaagttagttgatgaaggaattatttccgaagacgaaatgaatgaagtcattgacggtgttcaaaaagaaatgcgaacagcacatgataaaattgataaaaatgacaaaatgaataatccagatatggaaaaaccagaatcacttcaactacctttacaaagtgatacgaaagatttctcatttgatcatttaaaagaaatcaatgatgcaatgcttgattacccaaaagattttcatgtgctaaaaaagctcaataaagtactagaaaaacgtagagaaccttttgaaaaagaggaggggctcgtcgattgggctcaagcagagcaacttgcatttgcaaccatattacaagatggaacttcaattcgtttaacaggtcaagatagtgaaaggggaacatttagccatagacatgctgtgcttcatgatgaagaaaatggtaatacattcacaccattgcatcatgtacctcaacaacaggctacttttgatattcataattcgccattatctgaagcagctgtagttggatttgagtatggttataacgtcgaaaataaaggtaactttaacatatgggaagctcaatatggcgacttttcgaatatgtcccaaatgatgtttgacaatttcctctcaagttctcgcgcaaaatggggtgagcgttcaggtttaacacttttcttaccacatgcttttgaaggacagggaccagagcattcatcggcacgcttagaaagatttctacaattagccgctgaaaataattcaactgtagttaatctatctagtgcaagtaattacttccatttactacgtgcacaagccgctagtttagataccttagaaatgagaccattaattgtcatgtcacctaagagtcttttaagaaataaaacagtagctaaacctattgatgagtttacatctggcggttttaaacctatcatcacagaagatatcgatgaacaaaaagtcaaaaaagtgattttagcatcaggaaagatgtatattgacctaaaagaatatttagctaaaaatcctaacgattctattcttctcatagcagtagaaagattatatccgttcccagaagaagaaattaaagaagtattaaaatcgttacctcatcttgaaaatgtgtcatgggttcaagaagaacctaaaaatcaaggtgcatggttattcgtgtatccttatctaaaagcacttgttgctaataaatatgatttaacttatcacggtagaatacaaagagctgcacctgctgaaggcgatggagaaattcataaacttgtacaaactaaaattattgaaagtagcattaacaattaa

SEQ ID NO: 7785 - DNA, 1371 bp, Staphylococcus epidermidis
atgattaagcgccaaaaattaaaatataaatggatgcttattacgacgctcattaccttcacgacaatattacttttctgcttaattattattttctttttaaaagatactttacgaagtagtgaaattgacgaagctgaaagaagttcaaatgatatcgccaatctgttccattctaaatctttaagtgatatatctgcattggatttaaatgcatccttagaaaattttcaagaaatattgatttatgatgataagggtaggaagttaattcaaacatcaaatgataatacacttgcttatgataacaaaattgatttcaaacatcctgaacgtatacatattcaaagaagccacggtattaattacttagtaataactgaacctatacgttcgaaagatttttctggatacagtgtattagtccattctcttcaaaattatgataatctcgttaaatcactttatatagttgcacttgcttttggattaattgcaaccattattactgccggcgtgagttatatcttttcttcacaaattactaaaccgatagttacaatgtccaataaaatgaatcaaattagaagagatggttttcaaaataaacttgaattaactacaaattatgaagaaacagataatttaattgatacttttaatgaaatgatgtatcaaatagaagaatcttttaatcagcaacgtcaatttgtcgaggatgcttcacacgaattaagaacgccactgcagattattcaaggtcatctaaatttaatccaacgttgggggaaaaaagatccagcagttttggaagaatctttgaatatttcaattgaagaagtgaatcgaataacaaaacttgtcgaagaactacttttacttaccaaagatagagtcaatcataatgttttggaatgtgaaaatgtagacgtaaatagcgagattcaatcacgtgtgaagtcactgcaacacctacatccagattatacttttgaaacacatcttgctactaagcctatccaattaaaaattaaccgtcatcagtttgaacaactcttactcatatttattgataatgcaatgaaatacgacactgaacataagcacattaaaattgttactcaactaaaaaataaaatgattatgattgatattactgatcatggtatgggtataccaaaagctgacttagaatttatctttgatagattttatcgtgtagataaatcacgtgctcgtagtcaaggaggcaatggattaggactatcaatagcggaaaaaattgtgcaacttaacggtggtatgattcaggtagaaagtgaactacaaaagtacacgactttcaaaatcagttttccagtactaaactaa

SEQ ID NO: 7786 - DNA, 660 bp, Staphylococcus epidermidis; identical to SEQ ID NO: 3219

SEQ ID NO: 7787 - DNA, 768 bp, Staphylococcus epidermidis; identical to SEQ ID NO: 3220

SEQ ID NO: 7788 - DNA, 1326 bp, Staphylococcus epidermidis
atgatcgtttctaaaagaacgtttcggtcattatacattcctattttgatagaacaacttttcatactcatcatgggtcaagctgatacattgatgttaaacagctatagcactgatgccgttgctgcttcgggaatgataagccaaatactcatgctcatcacgtttctgattacaatcattcatgtgggtacaaatatacgtattgttcatttgaaggaacatcaaccttcaagtatttcacaagagatttatcataatttgttattcaatagcatagtatctatcgtatttacgattgtgattgggatcgcattcgaacttatcttacgactttttcaggtacctcaagatatattcaaactgacctatcaatttggaatgattatattgagtgtactcactttaacgacctgtcacatgtatattggtactgtattacgtgtcatgaatcatgcatcatcagctacacgcattactatcattagtaatgtgactaatatcattttgaacggtatcgtactctttattattccacaatatgtaggtaaccctgtattaggtgtcgcggtggtaacagcgttcagtcgtttattgggatgtactttagctttaattgcgctgatacaaattttccgtccattcaagcattacttcaagctgagctggaagaaaatatatcaggtttcgacattaggtatcccaacagcaggtgaacaaatttcttataattttgcacagacatttacaactgcatttattgcgatgttaggcactcaagtcatcgctgcgaaatctgtttctactgttttaagcagcctgtcttttagttgtgctatggcatttagtgctgctagccaaatttatttaggaaaatttatatcccgtcgacgttaccgtactttaaagaaagttgttataaaaagtatttggtttaatatcacacaatctttcatgattatgacgtgtgtatttataggatttatagtgtgtggacgttggataacacacgacatacaaacctatcatttaatcatttactatcttgttatactttttggattagaaccgatacgtgcaattaataatctaattgtagatttattaaacgtgacaggggatgtacgttatccagtcaccgtgagtgttgtgaccacatggttgttattattacctggaagttatctattagggattcattggagattaggttatacaggaattattttagtgagtattgctgatgaagcgctgagatttatcattatgtatcttagatggcgaaatgatcgttggcaagcacgaatgaagcagattggagtatag

SEQ ID NO: 7789 - DNA, 855 bp, Staphylococcus epidermidis; identical to SEQ ID NO: 3222

SEQ ID NO: 7790 - DNA, 897 bp, Staphylococcus epidermidis; identical to SEQ ID NO: 3223

SEQ ID NO: 7791 - DNA, 1689 bp, Staphylococcus epidermidis; identical to SEQ ID NO: 3224

SEQ ID NO: 7792 - DNA, 957 bp, Staphylococcus epidermidis
atgagtaaaaacaaaaaacaaagccttcaatccgctcatcaaaaacctttgttaaaaagaatgtgggaacacaaagtactttacttaatgattttaccttgtttactctttttcttgattttcaactatattccaatgacaagtcttgttctggcattcaaagatttccgcttcgatactggtatcatcggcggtgattggaaagggctatactattttaaacgctttttctctgaccctcgatgtattcaaattattatgaatacgctaattataagtggcatgaaattgattttagctctaccatttccaattattttagccattatgtttaacgaaattaaagattctaaattaggtaagatcagaggtttatttcaaggcgtactttacatccctcattttttatcttgggttgtagttatcagtattttcaagaaattactcgctccagatgatggacttatgaatcaactgatccatcaatttggtggcgacgggtcgacttactttatgatgaaccctgagtatttccacaccatcatgttttctagttatatatggaagaatgtagggtgggattccattatttattttgcagcaattatgagtattaatcctgaaatttatgaatcagctgcgattgatggcgcgaatcgtttcaaacaaattatacatattaccttacctatgttaacaccaacaattgttattttattcatcatttctctaggcgatattttaaaagcagggttcgatcaaatttacctactcaaaacaccaggtaacgctaacgtttcagaaatactggatacatttgtgattcgtactggtattgagcaaggcgatttcagttacgcaattgcgattagtctattacagggtgtgataggacttatcgctgtcgtcattattaataaattcgcagataagaaactggatacatcactatattaa

SEQ ID NO: 7793 - DNA, 1092 bp, Staphylococcus epidermidis; identical to SEQ ID NO: 3226

SEQ ID NO: 7794 - DNA, 615 bp, Staphylococcus epidermidis; identical to SEQ ID NO: 4869

SEQ ID NO: 7795 - DNA, 1074 bp, Staphylococcus epidermidis; identical to SEQ ID NO: 4868

SEQ ID NO: 7796 - DNA, 504 bp, Staphylococcus epidermidis; identical to SEQ ID NO: 4867

SEQ ID NO: 7797 - DNA, 1476 bp, Staphylococcus epidermidis
atgaatgatcatcaaaaaaatcatgcaacatctcaagatgataacacaaagtcaacaccatctaagaatagcaagcatataaaaattaaattatggcatttcatactcgttattttgggtattattcttttaacatccatcattactgtagtatcaacaattttaattagccatcaaaaaagtggtttaaataaagaacaacgtgcaaatttaaaaaaaattgaatatgtctatcaaacacttaataaagattattacaaaaagcaaagttctgataaattaactcaatctgccatagatggtatggttaaagaacttaaagatccatattcagaatatatgactgctgaagaaacaaaacaatttaatgaaggtgtatcaggtgatttcgttggcataggtgctgaaatgcaaaagaaaaatgaacagataagtgttactagtccaatgaaggattcaccagcagaaaaagctggtattcaacctaaagatatcgtcacacaagtgaatcatcattcggtagtcggtaaaccacttgatcaagttgttaaaatggtccgcggtaaaaaaggaacatatgttactttaactataaaacgtggttcgcaagaaaaggatattaagattaaacgcgataccattcacgttaagagtgtagagtatgagaagaaaggcaatgtaggcgtactaacaatcaataaattccaaagcaatacttctggtgaactcaaatctgcaatcatcaaagcgcataagcaaggcatccgtcatatcattttagatttgagaaataatccgggggggttattagatgaggcagtcaagatggctaacatctttattgataagggaaatactgtcgttcaattagaaaaaggtaaggataaggaagaattaaaaacttctaatcaagcactaaaacaagcaaaagatatgaaagtatccatcttagttaatgagggatcagctagtgcttcagaagtgtttacaggtgctatgaaagactatcataaagctaaagtttacggttctaaaacatttggtaaaggtatcgttcagaccactcgtgaatttagtgatggttcattaattaaatatacagagatgaaatggctaacgcctgatggccattatattcatggtaaaggaattagaccagatgttagtatctcaacaccaaaataccaatcactcaatgtcattccagataacaaaacttatcatcaaggtgaaaaagataaaaatgttaaaacgatgaaaataggtctaaaagctttaggttatccaattgataacgaaacaaacatatttgacgaacaattagaatctgctattaaaacatttcaacaagacaataatttaaaagttaatggcaattttgataaaaaaacaaatgataaatttactgaaaaactagttgaaaaagcgaataaaaaagatactgttttaaacgatttactaaacaaactaaaataa

SEQ ID NO: 7798 - DNA, 225 bp, Staphylococcus epidermidis
atggttaagaattattcattttatcaatttattatgaccgtgcgcggaagaaaagacgataaaggtgtttttgctgagcaaatttttgaagaccttgcctttccaaaacacgaagatgattttaatacattatctgaatatattgagacacatagcgaattcaccctaccaatgtctgtatttgatgacttatatgatgactatacagaatggttgaagttttaa

SEQ ID NO: 7799 - DNA, 501 bp, Staphylococcus epidermidis
atgtttaaaaagttatttggaaaagctaaagaagttgacaaaaacattaaaatctacgcacctttgacaggtgagtatgtcaaaattgaagatattcctgatccagtgtttgcgcaaaaaatgatgggagaaggctttggtattaatcctacagagggtgaagttgtttcaccgattgaaggcaaagtcgataatgtttttccaacgaaacatgccgtagggttaaaagccgaaaatggattagagttattagttcatatcggattagataccgttcaattggatggaaaagggtttgaagtacttgttgaaagtggagatgacattaaaataggtgacccacttatacgttttgacttagaatatattaataataatgcaaaatctattatttctcctattattattacaaactctgatcaaactgaatcaattcatattgaagacgtacaagcagtagttaaaggggaaacacaagttattgatgtgacagtaagctaa

SEQ ID NO: 7800 - DNA, 429 bp, Staphylococcus epidermidis
atgattaaaaaaaacaaagaagaactgaatgacatggagtatctagtcactcaagaaaatggtactgaacctccgtttcaaaacgagtattggaatcactttgaaaaaggaatttacgttgataaattgtccggcaaaccattatttacttcagaggataaatttgaatctaattgcggttggccaagtttctccaaagcattaaatgatgatgaaatcgtagaacttgttgataaatcatttggtatgattagaactgaagttcgatcagaaaaagcaaatagtcacttggggcatgtttttaatgacggacctaaagaaaaaggtggtttaagatactgtattaactctgctgcgattcagtttataccttatgataaactagaagagttaggatatggagatttaattaaacattttaaaaaatag

SEQ ID NO: 7801 - DNA, 525 bp, Staphylococcus epidermidis
atggcatatgcgacactagctggaggttgtttttggtgcatggttaaacccttcacctcatatcctggaataaaatcagtcgtttccggatatagtggaggacatgtagaaaatccaacatacgaacaggtatgcacaaatcaaacaggacatgtggaagctgtacaaattgaatatgaccctaatattacaacatttgaaaatatcttagacgtttactttaaaacatttgacccaactgatgacggagggcagttctttgatagaggtgaaagctatcaacctgtcattttttatcatgatgagaatcaactcaaagctgccgagttaaagaaacaacaaattgacgaagagggtatctttaaaaaacctgttatcacaccgataaaaccatataaaaatttctatcctgcagaagaatatcatcaagattactacaaaaagaatcctacgcattatgaacaataccaacgtggatctggtagaaaagcatttatcgaatcacactggggaggctcaaaatga

SEQ ID NO: 7802 - DNA, 849 bp, Staphylococcus epidermidis
atggctaaacaaattatcgtcacagattcaacctctgatttatcacatgaatatttaaaacaacataacattcatgttataccattaagcctgacaatcgacgggaaatcttacactgatcaagttgatatctcttcaagtgagtatatcgatcatattgaaaatgatgcagacgtcaaaacaagtcaaccacctattggtcgatttattgaaacatatgagcaattagctcaagatgacgttgaaattataagtattcatctttcgtcaggcttaagtggtacttataatactgctgttcaagcgagccatatggtagatggcaatatcacagtgattgattctaaatctatttcgtttgggttaggttatcaaattaagcaaattgttgaattaataagtcaaggtacatcaacagaagaaatagtgaaggaaatgacacagttacgtgataacttgcaactgtttgtggttatcggtcagcttaatcaactcattaaaggtggaaggataagtaaaacaaaaggtttaattggaaacattatgaaaattaagccaatcggaactttaagagatggtaaacttgaactagtgcataattctagaactcaaaactctagtgtgcaatatttaaaaaaagaaattacagattttgttaaagatcataaaattaaatcaataggtattgctcacgccaacgttaaagatttcgttgataaaatcataaaatcatttacagagtcatttgattttagccaatttgatattaatgtaacaactccagtgatttctacacacactggacaaggtgcaattggacttgtggtattgagagatacgttgaactaa

SEQ ID NO: 7803 - DNA, 486 bp, Staphylococcus epidermidis; identical to SEQ ID NO: 4860

SEQ ID NO: 7804 - DNA, 957 bp, Staphylococcus epidermidis
atgtataatccattcgacgaagcttatcatggcttatgcgaagagatattagaaatagggaatagacgcgatgatcgcacacataccgggacaatttccaaatttgggcatcaattgcgtttcgatttaaccaaagggtttcctttacttacaaccaaaaaggtttcttttaaattagtagcaactgaattattatggtttattaaaggagatacaaacattcaatacctacttaaatataataacaatatatggaatgaatgggcatttgaaaattatgttcagtctgatgattatcatggaccagacatgacagattttggacatcgttcccagcaagaccctgaatttaacgagcagtataaagaagaaatgaaaaaatttaaagaacgtattctaaacgatgatgcatttgctaaaaaatatggcaacttagggaatgtttatggtaaacaatggagagattgggaagataaaaatgggaatcattacgatcaattaaaatcagttatacaacaaattaaaaccaatccaaactctcgacgtcacattgtttcagcatggaatcctactgaaatcgattcaatggcattaccaccttgccacacaatgtttcaattttacgtacaagagggtaaattaaattgtcaattatatcaaagaagtgctgatatatttttaggtgttcctttcaatattgcaagttatgctttactgacacatcttgttgcaaaagaatgtggacttgaggtgggtgaattcattcatacatttggagatgcacatatttattccaatcatatggatgcaatacatacacaattatcaagagatagttatctaccacctcaattaaaaattaatacagataaatcaatttttgatattaattatgaagatttagaattgataaattatgaatcacaccctgctattaaagcacctattgcggtataa

SEQ ID NO: 7805 - DNA, 663 bp, Staphylococcus epidermidis
atgttagagttcaaacaagtgagcaaatctttcagagatggcaatcaaatgattcaggcagtaaaacctaccgatttaaaaataattcagggggaactgattgctatcgtgggaccctcaggttcagggaaaagtacatttttaactatggctggcgccttacaaagacctacgtcaggaaatatttacatcaataacaaaaatatatcaatattatctgaaaaacagttatctcaaataagaattaacgaaataggttttatattacaatcgacgaatctcgtgccttttttaacaatcgaacaacaattcaaacttcttggtaaatataaaaaagatacattaagtgaagatgaataccaaaagttggttaaacagctaaatttatcggatattaccaatcaattaccaaatcaaatatctggcggtcaaaaacagcgcgtggcaatagctaaagctatttacacaaatccatcaatcatactagcagatgaacctaccgcttcactagatacgaataatgcaatggctgtaatgaaaatacttcaaaaacaaacgaaagaaagaaataaaacatgtgtgattgttactcatgatgaacgtttaactcatttttgtgataaaacatatttcatggaggatggagttctttcactccaatag

SEQ ID NO: 7806 - DNA, 1050 bp, Staphylococcus epidermidis
atgtttttagcttggaatgaaataaaaagaaataaaattaaattcagtttagtcattggcatattagtacttataagttatttattattcctactgtcaggacttgcaaacggccttattaaaatgaatactgaaggtatagaaaagtggaatgcagacgctatcatattaaaaaaagaagctaatcaaaccgtagagcaatccttattcaatatatccaaagtacaaaatacttatgaaaaatcaaccacattaaaacaacaaggagttattatctcaaaccatcatcgggaagaaaacgcgttactttttggcgttacacacaaatcatttttaattccgcctataattaaaggtcatcaagttgaaagttcaaatgaaatagtcattgatcaaacattagctgataaggggttcaaaataggtgacatcttatctttatctcaatcagacgaaaagctaaaagtggtaggtattgtagaaagtgctaaatataatgcttcacccgtgctattctctaataatcaaaccattgagaaacttaatcccaaattatcaaaagataaaacaaatgctatagtaatcaaagactcaaattggaaaaatcataaacttaacaaagatttagaaagcatttcaatatcgcagtttattaaaaatcttcctggctataaagctcaaaatttaactttgaactttatgatcgttttcttatttataatttcagcaacagtaattggcgtattcttatatgttataacactccaaaaaacacacttatttggtgtacttaaagcacaaggctttaccaactgctatttagcaaaaatggtttttgctcaaactttcatattatctttaattggaacaatcataggatttctcttaacactattaacaggtacatttttaccgcctgtcgttccaattcattttaatttattaacgatgttgatatatggaattgttcttatcattatttctttattagacagtctattttctgtgttgtctataataaaaataaatccacttaaagcaattggatag

SEQ ID NO: 7807 - DNA, 441 bp, Staphylococcus epidermidis
atgatgaatggatacgaagcttatatgaaagaacttgcacaacaaatgagagctgaattaacagacaatggattcacaagtcttgaaacgagtgatgacgtcaatcagtatatgcaaaatatagataatgatgatacaacatttgttgtaatcaactcaacatgcggttgtgctgcaggattagcacgtccagcagctgttgcagttgcagagcagaatgaagtaaaaccagatcataaagtaactgtatttgctggtcaagataaagaagcaacacaaacaatgagagattacatccaacaagttccttcaagtccctcatacgcattatttaaaggtcaacatttagttcattttatacctcgcgaacatattgaagggcgcgacatcaatgatatagctatggatttaaaagatgcttttgatgataattgtcaataa

SEQ ID NO: 7808 - DNA, 261 bp, Staphylococcus epidermidis
atggagattatagcaatttcagaaacacctaatcataatacaatgaaagtttcgttgagtgaaccacgtcaagataactcatctacaacatatactgccgctcaagaaggtcaacctgaatttattaatcgattatttgaaatagaaggtgttaaatcaatattctatgttttggattttatatcaattgataaagaagataacgctaactggaatgaattattaccacaaattgaaaacacgttcgctaaaagcaattaa

SEQ ID NO: 7809 - DNA, 195 bp, Staphylococcus epidermidis; identical to SEQ ID NO: 4854

SEQ ID NO: 7810 - DNA, 705 bp, Staphylococcus epidermidis; identical to SEQ ID NO: 4853

SEQ ID NO: 7811 - DNA, 396 bp, Staphylococcus epidermidis; identical to SEQ ID NO: 4852

SEQ ID NO: 7812 - DNA, 30540 bp, Staphylococcus epidermidis
ttgtcaaaattatcaacattaaaaacgtataattttcaaatcacatcaaacaacaaagaaaaaacatcaagaataggagtggcaatagctttgaataatcgtgataaattacaaaaatttagtattcgaaaatacgcaattggaacattttctactgtgattgcaacacttgtgttcatgggtatcaatacaaaccatgcaagtgccgacgagttgaatcaaaatcaaaagttaattaaacaattaaatcaaacagatgatgatgattcgaatacgcatagtcaagaaatcgaaaataacaaacaaaattctagtgggaagactgaatcattacgttcatcaactagtcaaaatcaagcaaatgcacgactgtcggatcaattcaaagacactaatgaaacatcgcaacaattacctacaaatgtttcggatgatagtatcaatcaatcgcatagtgaagcaaatatgaataacgaaccattgaaagttgataatagtactatgcaagcacatagtaaaatagtaagcgatagcgatgggaatgcttctgaaaataaacatcataaactaacagaaaatgtacttgcagaaagccgagcaagtaaaaatgacaaagagaaagagaatctacaagagaaagataaatcgcagcaagtacatccaccattagataaaaatgcattacaagctttttttgacgcatcatatcacaattacagaatgattgatagagatcgtgcggatgcaacagaatatcaaaaagtcaaatctacttttgactacgtcaatgacttactaggtaataatcaaaatattccttcagaacagcttgtttcggcatatcaacaattagagaaagcattagaacttgcacgtacgttaccacaacaatctactacagaaaaacgtggtagaagaagtacgagaagtgttgttgagaatcgttcatcaagaagcgattacttagatgctagaactgaatattatgtttcaaaagacgatgatgattctggtttccctcctggtactttcttccatgcttcaaatagaagatggccttataatttaccaagatctaggaacatcttacgtgcttctgatgtacaaggtaatgcttatatcactacaaaacgacttaaagatggatatcaatgggatattttatttaatagtaatcataaagggcatgaatatatgtactattggtttggacttccaagtgatcaaacaccaactggtccagtaactttcactattatcaaccgtgatggttcaagtacatctactggtggcgttggatttggatcaggtgcaccactacctcaattttggagatcagcaggtgctattaattctagcgtagcgaatgattttaaacatggctccgctacaaattatgcattttatgatggtgttaataatttttctgactttgctagagggggagaattatacttcgacagagaaggcgctacacaaactaataaatattatggcgatgaaaacttcgcattgctaaatagtgagaaaccagatcaaataagaggattagatacaatatatagttttaaaggtagtggtgatgtaagttatcgtatttcatttaaaactcaaggagctccaactgcaagattgtattatgctgctggcgcgcgttctggtgaatataaacaagcaacgaactataaccaactctatgtcgaaccttataagaattatcgaaatcgagtacagtcaaatgtccaagttaaaaatcgtacacttcatttaaaaagaacaatcagacaattcgatcctacattacagagaactactgatgttcctattttggatagtgacggttccggaagtattgattcggtatacgacccattaagttatgtaaagaatgtgactggtacagtcctaggtatttatccatcttatcttccgtataatcaggaaagatggcagggagctaatgcaatgaatgcctatcaaattgaagaacttttttcacaagaaaatcttcaaaatgcagcacgttcaggtcgtccaattcaatttcttgtaggttttgatgttgaagatagccatcataaccctgaaactcttttaccagtaaatttatatgtaaaacctgagttaaaacatacaattgagttatatcacgataatgaaaaacaaaatagaaaggaattttcagtatcgaaacgagcgggccatggtgttttccaaataatgagtggaacgcttcataacactgtaggatcaggaatattaccttatcaacaagagattcgtatcaaacttactagtaatgaaccaattaaagatagtgaatggtctattacaggatatcctaacacgcttacattacaaaacgctgtgggtagaacaaataatgctactgaaaaaaacttagctcttgttggtcatattgatccaggaaattatttcatcactgttaagtttggtgataaagtcgaacaatttgaaattagatcaaaaccaactccaccaagaatcattacaactgctaatgaattacgtggaaattctaaccacaagcctgaaataagagtaacagatataccaaatgatactactgctaaaatcaaacttgtgatgggcggaaccgatggtgatcatgatccagaaataaatccatatactgtccctgaaaactacacagtagttgcagaagcataccatgataatgatccaagtaaaaatggggtcttaacattccgttcatcagactaccttaaagatctaccattaagcggtgaattaaaggcaattgtttattacaatcaatatgtacaatcaaactttagtaatagcgttccgtttagtagcgatacaacaccacctacaattaatgaaccagcaggactagttcataagtattacaggggagatcatgtagaaattactcttccagtcactgataatactggcggttcaggtttaagagatgtaaacgtcaatttacctcaaggttggacaaaaacctttacaatcaatcctaataataatactgagggtacgcttaagttaattggtaatatacctagtaatgaagcatataatacgacatatcatttcaatattactgcaaccgataattctggaaatacaacaaatccagctaaaacctttattttaaatgttggtaagttggctgatgatttaaatccagtcggattatctagagatcaactacaattagtgacagacccttcttcattatctaattccgaacgagaagaggtaaaaagaaaaataagtgaagcaaatgctaatataagatcatatttattacaaaataacccaatactcgctggagtaaacggcgatgttacattttattatagagatggttctgtagatgttattgatgctgaaaatgtaatcacatatgagcccgaaagaaaatccattttcagtgaaaatggtaatacaaataaaaaagaagcagtaatcactattgctagaggacaaaactataccattggtccaaacttaagaaaatatttctcattaagtaatggttcggatttacctaatagagatttcacctctatatcagctattggatctttaccttcatcgagtgaaattagtcgactcaatgttggaaattataactatagagttaatgctaaaaatgcttatcataagactcaacaagaacttaatttaaaacttaaaatagtagaggttaatgcacctactggtaataatcgtgtatatagagttagtacttataatttaactaatgatgaaatcaataaaatcaaacaagcatttaaagcagctaattctggacttaatttaaacgataacgatatcactgtttcgaataactttgaccatagaaatgttagtagtgtgacagtaactatacgtaagggcgatttgataaaagagttttcatcaaatctcaataatatgaatttcttacgttgggttaatataagggatgattataccatttcgtggacttctagtaagattcaaggtagaaatacagatggtggattagaatggtcaccagatcataaatcacttatttataaatatgatgcaacattaggtagacaaataaatactaatgacgtgttaactttacttcaagcaacagctaaaaactcaaatttacgttcaaatatcaatagtaatgaaaaacagttagcagaacgagggtctaatgggtattctaaatctataattagagatgatggcgagaaatcttatttacttaactcaaatcctattcaagtattagacttagtagaaccagataatggttacggtggacgtcaagtcagtcattctaacgttatatataatgaaaaaaattcttctatcgtaaatggtcaagttccagaagctaatggggcatccgcttttaatattgataaagttgttaaagctaatgcggcaaataatggtattatgggtgttatctataaggcacaattatacttagcaccatacagtccaaaaggttacattgaaaaattaggccaaaatttaagcaataccaataacgtgattaatgtttattttgtgccttctgataaagtaaatcctagtataactgtaggtaattacgaccatcatacggtatattctggtgaaacatttaaaaatactatcaatgtaaatgataattatggattaaatacagtagcttctacaagtgatagtgcaattactatgaccagaaacaacaacgagttagtaggtcaggctcctaatgttactaatagcacaaataaaattgtaaaagttaaagccacagataaaagtggaaatgaaagtattgtttctttcacagtaaatataaaaccattaaacgagaaatatagaataacaacttcatcaagtaatcaaacaccagtgagaattagtaatattcaaaacaatgctaacctttcaattgaagatcaaaatagagtaaaatcttcactcagcatgactaaaattttaggtacaagaaattatgtcaatgagtcaaataatgacgttcgtagtcaagttgtaagtaaagtaaatagaagtgggaacaatgctacagttaatgttacaactacattttctgatggtacaactaatacaataaccgttccagttaaacatgtgttattagaagttgtacctactactagaacaacagtaagaggacaacaatttccaaccggcaaaggaacttccccaaatgatttctttagtttaagaacgggaggtccagttgatgcgagaatagtttgggttaataatcagggacccgatataaatagtaatcaaattggtagagatttaacattacacgctgaaatattctttgatggtgaaacaacaccaattagaaaagatactacttacaaacttagtcaatctattccaaagcaaatatatgaaacaactatcaatggtcgatttaattcatcaggtgatgcatatccaggaaattttgttcaagcagtaaatcaatattggccagaacatatggacttcagatgggcccaaggatcaggcacaccaagttctcgtaatgcaggttcatttactaaaacagttacggtagtttatcaaaacggccaaactgaaaacgttaatgtactattcaaagtcaaaccaaataaacctgttattgatagtaatagtgtgatttcaaaaggacaattaaatggtcaacaaattttagttcgaaatgttccacaaaatgcacaagtcactctatatcaatcaaatggaactgttattcctaatacaaatacaactatagattctaatggtatagctactgtaacaattcaaggcactctaccaaccggaaatattactgctaaaacctcaatgacaaataatgtaacgtacactaaacaaaatagtagtggaattgcttcaaatacaactgaagatataagtgttttttcagaaaacagtgatcaagtaaatgttaccgctggcatgcaagctaaaaatgatggtattaaaataattaaaggtacaaactataattttaatgacttcaatagtttcataagtaatataccagcccattctactcttacatggaacgaggagcctaatagttggaaaaacaacatcggtactacaacaaaaactgttacagttactctacctaatcatcaaggtacgagaactgtagatattccaataacaatctatccaacagttacagctaagaatccagtaagagatcaaaaaggacgaaacttaaccaatggtactgacgtttataattatattatttttgaaaataataaccgtcttggaggaacagcttcttggaaagacaatcgtcaacctgataaaaacatagccggtgtacaaaatttaattgcacttgttaattatcctggcatatctacaccattagaagttcctgttaaagtgtgggtatataattttgatttcactcaacctatctacaaaattcaagtaggagatacattccctaaaggaacatgggcaggctattacaaacatcttgaaaatggagagggattaccaatagatggttggaaattttattggaaccagcaaagtacaggaactactagtgatcaatggcaatcattagcatatactagaactccttttgttaaaactggtacttatgatgtcgttaatcctagcaactggggtgtttggcaaacatcacaatcagctaaatttatagttacaaatgctaaacctaatcaaccaaccataactcagtctaaaactggtgatgtaacagtaacacctggtgctgtgcgtaatatactaataagtgggacaaatgattatatccaagcatctgcagataagattgttattaataaaaatggaaataaattaactacatttgttaaaaataatgatggtcgttggactgttgaaactgggtcacctgacataaatggtatcggaccaacaaataacggaactgctatatctttaagtcgattagcagttagacctggggattcaatagaagcaatagcgactgaaggttccggagaaactataagtacttcagcaactagtgaaatttatattgtcaaagctccacaacctgaacaagtagcaactcatacttatgataatggaacattcgatatattacctgacaattcacgtaattctttaaatccaactgaacgtgtcgaaattaattacactgaaaaattaaatggcaatgaaacacaaaaatcattcactattactaaaaataacaacggcaaatggacgataaataataaaccaaattatgtcgagttcaatcaggataatggtaaagttgtattttcggccaatacaattaaacctaattctcaaattacaataactcctaaagcaggtcagggtaacactgaaaacacaaatcctactgtaattcaagcacctgcgcaacatactttaacaatcaatgaaattgttaaagaacagggtcaaaatgtgactaatgatgatattaataatgcggttcaagtgccaaataaaaatagagttgcgattaaacaaggaaacgctcttccaacaaatttagctggtggtagtacatcacatattccagtagttatttattacagtgatggaagttctgaagaagctactgagactgttagaactaaagttaataaaaccgaattaatcaatgctcgtcgtcgactagatgaagaaattagtaaagagaacaaaacaccatcaagtatcagaaactttgatcaagctatgaatcgtgctcaatcacaaattaatacagctaaaagtgatgctgaccaagttataggcacagaatttgcaacacctcaacaagtaaattcagctttatctaaagttcaagcggcacaaaataaaataaatgaagctaaagcattattacaaaacaaggctgataatagtcaacttgtgagagcaaaagaacaattacaacaatcgattcaaccagccgcttcaactgatggtatgactcaagatagcacaaggaactacaacaataaacgccaagcagctgaacaagcaatacaacatgcaaatagcgttataaataatggagatgcaacatcccaacaaattaatgatgctaaaaacacagttgaacaggcacagagagattatgttgaagctaaaagcaacttacgtgctgataagtcacagttacaaagcgcttatgatacgttaaatagagatgttttaacaaatgataaaaagccagcatctgtaagacgctataatgaagccatttcaaatattagaaaagaattagatacagctaaagcggatgcaagtagtactttgcgaaacaccaatccttccgttgaacaagttagagacgctttaaataaaataaatactgttcaacctaaagtgaatcaagcaattgctttacttcaaccaaaagaaaataattcagaacttgtacaagctaaaaaacgtttacaagacgctgtaaatgacatacctcaaacacaaggtatgacacaacaaacaattaataattataatgacaaacaacgtgaagctgaaagagcacttacatctgcacaaagagtgattgataatggggatgctacaactcaagaaatcacttctgaaaaatctaaagtagagcaagcaatgcaagctttaactaatgctaaaagtaatctgagagctgataagaatgagttacagactgcatataacaaattaattgagaacgtatctaccaatggtaaaaaaccggcgagtatacgtcaatacgaaacagccaaagccagaatacaaaatcaaattaatgatgctaaaaatgaagcggagcgaattttaggtaatgataatccacaagtatcacaagtaactcaagcattgaacaaaatcaaagctattcaaccaaaattaacagaagctatcaacatgcttcaaaacaaagaaaataatacagaattagtcaatgctaaaaacagacttgaaaatgcagtaaatgatacagatccaacacacggtatgactcaagaaacaattaataattacaacgctaaaaagcgagaagctcaaaatgaaatacaaaaagcgaacatgattattaataatggagatgctactgctcaagatatttcttctgaaaaatctaaagtagagcaagtattacaagcattacaaaatgctaagaatgacttaagagctgataaaagaaaattacagactgcatacaataaacttatacaaaatgttaataccaatggtaaaaaaccatctagtattcaaaactataagtctgcaagacgaaatatcgaaaaccaatataataccgctaaaaatgaagcacataatgttcttgaaaatacaaaccctactgtaaatgcagtagaagatgctttacgtaagataaatgcaattcaaccagaggttacaaaagctattaatatacttcaagataaagaagataatagcgaacttgttagagcaaaagaaaaattagatcaagcgattaatagtcaaccatcactaaatggtatgactcaagaatctattaataattacacaacaaaacgtagagaagcacaaaatatagcaagttctgctgacactattattaataatggggatgcatctattgaacaaataacagaaaataaaattcgagttgaagaggcaactaatgcacttaacgaagcaaaacaacatttaacggcagatacaacttctttaaaaactgaagtacggaaattaagtaggagaggcgacacaaacaacaaaaagcctagcagtgttagtgcttataacaatactattcattcgctacaatctgaaattacacagactgaaaatagagcaaatactatcatcaataagcctattcgttctgttgaagaagtaaataatgcattgcatgaagtaaaccaattgaaccaacgcttaacagatacaattaacttattacaacctttagcgaataaagaaagcttaaaagaagctcgtaatcgacttgaaagtaaaattaatgaaaccgttcaaacagacggtatgactcaacaatctgttgagaattataagcaagctaaaataaaagctcaaaatgaatctagtattgcacaaactcttattaataatggtgatgcatctgatcaagaagtttctacagaaatagaaaaattaaatcaaaagctgtctgaattaacaaattcaatcaatcacttaacagttaataaagaacctttagaaactgccaaaaatcagttacaagcaaatattgaccaaaaacctagcactgatggtatgacgcaacaatctgtacaaagctatgaacgtaaactacaagaagccaaagataaaataaactcaattaataatgtcttagctaacaatccagatgttaatgctatcagaacaaacaaagttgagacggaacaaatcaataatgaattaacacaggcgaaacaaggtcttactgttgataaacaaccattgattaatgcaaaaactgctttgcaacaaagtctagataatcaaccaagtactactggtatgactgaagcaacaattcaaaattataacgctaaacgtcaaaaagcagagcaagttatacaaaatgcaaataaaattattgaaaacgctcaacctagtgtacaacaagtgtctgatgagaaatctaaggtagagcaagcactcagtgaattgaacaacgccaaatcagcgcttagagctgataaacaagaattacagcaagcatataatcagttgattcaaccaacggatttaaataataagaaaccagcttctatcactgcgtacaatcaaagatatcaacaatttagtaacgaattgaacagcactaaaacaaatacagatcgcattttaaaagagcaaaatccaagtgtagctgatgtcaacaatgcactaaataaagtaagagaagtacaacaaaaattaaacgaagccagagcacttttacaaaataaagaagataatagtgcactagttcgagccaaagaacaacttcaacaggcagttgaccaagtcccttcaacagaaggtgtgacgcaacaaactaaagatgattacaattcaaaacaacaagctgctcaacaagaaaaatcaaaagcacaacaagttatcgataatggcgatgcgactacacaacaaatttctaacgccaaaacaaatgttgaacgcgctttagaagcattaaataatgcaaaaactggtttaagagcagataaagaggaacttcaaaatgcatataatcaattaactcaaaatattgatacgagcggtaaaacgcctgcaagtatcaggaaatacaatgaagctaagtcacgtattcaaactcaaattgattcagctaaaaatgaagcaaacagtattttaacaaatgacaatcctcaagtatcacaagtgactgctgcgttaaacaaaataaaagctgttcaacctgaattagataaagcgatagcaatgcttaaaaataaagagaataataatgcattggttcaagcgaaacaacaacttcaacaaattgttaatgaagtagatccaacacaaggcatgacaacagatactgctaataactataaatcaaaaaaacgtgaagctgaagatgaaatacaaaaagctcaacaaatcattaacaatggcgatgccactgagcaacaaattactaacgaaacaaatagagtaaatcaagcgattaatgcaataaacaaagccaaaaacgatttacgtgctgataagtctcaattggaaaatgcttataaccaattaatacaaaatgttgatacaaatggtaaaaaacctgctagtattcaacaataccaagctgctcgacaagctattgagacgcaatacaataacgctaaatcagaagcacatcaaattcttgaaaatagtaacccttcagttaatgaagtagcacaagcattacaaaaagttgaagctgtacaacttaaagttaatgacgcgattcatatacttcaaaataaagagaataatagtgcacttgtcacagctaaaaatcaacttcagcaatcagttaatgatcaaccattaacaacaggtatgactcaagattctattaataactatgaagctaagagaaatgaggctcaaagtgctatcagaaatgcagaagctgtcatcaacaatggcgatgcaactgcaaaacaaatttcagacgagaaatctaaagttgaacaagcactagcacatttgaatgatgctaaacagcaattaactgcagatactactgaattacaaacagcagttcaacaattaaacagaagaggcgatacaaataataaaaagccaagaagtatcaatgcatataataaagcaattcaatcattagaaacacaaattacttctgctaaagataatgccaacgctgtgatacaaaaacctatacgtactgttcaagaggtaaataatgcattacaacaagtaaatcagttgaatcaacaattaactgaagcaattaatcaacttcaaccgctatcaaataatgatgcattaaaagctgcaagattaaatttagaaaataaaattaatcaaactgtacaaactgatggtatgacacaacaatctatagaggcttatcaaaacgctaaacgcgtagcccaaaatgaatctaacactgctttagcattaattaataacggcgatgccgatgaacaacaaattacaactgaaacagaccgagtcaatcagcaaactacaaacttaactcaagcaattaacgggttaacagttaataaagaaccattagaaaccgctaaaacagcgttacaaaataacatcgaccaggtacctagtacagatggtatgactcagcaatctgttgcaaattataatcaaaaactacaaatagctaaaaacgaaattaacacaattaataacgttttagcgaacaatccagatgttaatgcaatcaaaacgaataaagcagaagcggaacgaatcagtaacgatttaacacaagctaagaataacttacaagttgatactcaacctttagaaaaaataaaaagacaacttcaagatgaaattgatcaaggtactaacacagatggaatgactcaagattcagtggataattacaatgatagcttaagtgcagcaattatagaaaaaggcaaagtaaataaattacttaaacgtaatccgacagtagaacaagttaaagagagcgttgctaatgcacaacaagtcatacaagatttacaaaatgctcgaacttcacttgttccagacaaaactcaacttcaagaagctaaaaatagattagaaaacagtattaaccaacaaacagatactgacggcatgactcaagattcgcttaacaattataatgataaattagcaaaagctagacaaaaccttgaaaaaatatctaaagttttaggtggtcaacctactgtagctgaaattagacaaaatacagatgaagcaaatgcacataaacaagcattagacactgcacgttctcaacttacattaaatagagagccatatatcaatcatattaataatgaaagtcatttaaataacgcgcaaaaagataattttaaagctcaagttaactcagcacctaatcataatactttagaaacgattaaaaataaggctgatactttaaatcaatctatgacagcattaagtgaaagtattgcagattacgaaaatcaaaaacaacaagaaaattatttagatgcatctaacaataaacgtcaagactatgacaatgcagtcaatgcggctaaaggtattttaaaccaaactcaaagtccgacaatgagtgctgatgtgattgatcaaaaagctgaagatgttaaacgtacgaaaactgcgttagatggaaatcaaagattagaagttgctaaacaacaagcacttaatcatttaaataccttaaatgatttaaacgatgctcagcgacaaactttaactgatactataaatcactctccaaacatcaattcagtgaatcaagctaaagaaaaagctaatactgttaacacagcaatgactcaactgaaacaaactattgctaactatgacgatgaattgcatgacggcaattacattaatgcagataaagacaaaaaagatgcttataataacgctgttaacaatgctaaacaactgattaatcaatctgatgctaatcaagcacaacttgatccagctgaaattaataaagttacacaaagagtcaatacgactaaaaatgatctaaatggtaatgacaaattggctgaagctaaaagagatgctaatacaaccattgatggtttaacttatctaaatgaagctcaacgtaacaaagctaaagaaaatgtaggcaaagcttctacaaaaacaaatattacgagtcagttacaagattacaatcaattgaatactgctatgcaagcattacgtaacagtgtgaacgacgttaacaatgttaaagcaaatagcaattatataaatgaagataatggtccaaaagaagcttacaatcaagccgttactcatgctcaaacattgataaatgcacaatctaaccctgaaatgagccgtgacgtagtaaatcaaaaaacacaagcagtaaatactgcccatcagaatttacatggacaacaaaagttagaacaagcacaaagtagtgctaatacagaaatcggtaacttaccaaacttaactaatactcaaaaagctaaagaaaaggaactggtaaatagtaaacaaactcgtacggaagtacaagaacaacttaaccaagctaagtcactagatagttctatgggcacgttaaaatcattagttgctaaacaacctacagtacaaaaaacaagtgcttatattaacgaagatcaaactgagcaatctgcctacaatgattccattacaatgggacaaactataattaataaaacagctgatccagtacttgataaaactttagttgataacgcaatcagtaacatttcaactaaagagaatgcactgcatggtgaacaaaaattaacaactgctaaaacggaagcaattaatgcacttaatacattagctgatttaaacacacctcagaaagaggctattaaaacagctattaacactgctcatacaagaactgatgtaactgcagagcaaagtaaggctaatcaaataaatagtgcaatgcacacgttgagacaaaacatttctgacaacgaatcagtaacaaacgaaagtaattatattaacgctgaacccgaaaaacaacatgcctttactgaggctctaaataatgctaaagaaatagttaatgaacaacaagccactcttgatgccaattcaattaaccaaaaagcacaagcgattcttactactaaaaatgctttagatggcgaagaacaattacgtcgtgctaaagaaaatgccgatcaagaaatcaatacgttaaatcaattgactgatgcgcaaagaaatagtgaaaaaggtttagtcaacagttctcaaactagaacagaagttgcttctcaattagcaaaagctaaagaactaaataaggtgatggaacaactgaataaccttatcaatggtaaaaaccaaatgataaatagcagtaaatttatcaatgaagatgcgaaccaacaacaagcatattcaaatgcgattgcaagtgcagaagtgcttaaaaacaaatcacaaaaccctgaattagataaagtaacaattgaacaagcaattaataatattaattctgcaattaataatctaaacggtgaagctaaactgactaaagctaaagaagatgctgttgcttcaataaacaacctaagcggattaactaacgagcaaaaaacaaaagaaaatcaagccgttaatgactctcaaactagagaccaagttgctaacgttttacgtgattcaaaggcattagatcaatctatgcaaacattacgtgatttagttaacaatcaaaatgtaatacattcaacaagtaattattttaacgaggattcaactcaaaagaatacttatgataatgcaattgataatggctcgacatatataactggtcaacacaatccagaattaaataaatctactattgatcaaacgattagccgaattaacacagctaaaaatgatttacatggtgtagaaaagttacaaagagataagggaactgctaatcaagaaattggacaattaggttatttaaatgaccctcaaaaatctggtgaggaatccttagtcaacggttcaaatacacgttctgaagtagaagagcatcttaatgaagctaaatcattaaataatgcaatgaaacaattaagagataaagtagctgaaaagactaatgtcaaacaaagtagcgattacattaatgattcaactgaacatcaacgtgggtatgatcaagcacttcaagaagcagaaaatattattaatgaaatcggtaatccaacattaaataaatcggaaattgaacaaaagttacaacaattgactgacgctcaaaatgcgttacaaggttcacatctattagaagaagctaaaaataatgcgattactggaatcaataaacttacagcattaaatgatgcacaacgtcaaaaagcaattgaaaatgttcaagcacagcagacaatcccagcagttaatcaacaattaactttggatagagaaataaatactgcaatgcaagctttacgagataaagtaggccaacaaaataacgttcaccaacaaagtaattatttcaatgaagatgaacaaccaaaacataactatgataattctgtacaagccggtcaaactattattgataaacttcaagatccaatcatgaacaaaaatgaaattgagcaggctattaatcaaatcaatacgactcaaacagcgttaagtggagaaaataaattacacactgaccaagaaagcacaaatagacaaatagaaggtttatctagtttgaacacagctcaaatcaacgccgaaaaagatttagtcaatcaagctaaaacaagaacagatgttgctcaaaagttagctgcagctaaagaaataaattctgctatgagtaatttaagagatggcattcaaaataaagaggacatcaaacgtagcagtgcatatatcaacgcagatccgactaaagttacagcttacgatcaagcactacagaacgcagaaaatatcatcaatgccacaccaaacgtagagcttaataaagctacaattgaacaagcgctatcacgcgttcaacaagcacaacaagatcttgatggtgttcaacaattagctaatgctaaacaacaagctacacaaactgtcaatgggttaaatagcttaaatgacggtcaaaagcgtgaattaaatctattaattaattcagctaatacccgtacaaaagtacaagaagaattaaacaaagcaactgaattgaaccatgcgatggaagctttaagaaacagtgttcaaaacgttgatcaagtaaaacaaagtagcaattatgtcaatgaagatcaacctgaacagcacaattatgataatgctgtcaatgaagctcaagctacaatcaacaacaatgctcaacctgttctagacaaattagctatagaacgtttaactcaaactgttaacactacaaaagatgcattacatggtgctcaaaaactgacacaagaccaacaagctgctgaaactggaatacgtggtttaacgagtctcaatgaacctcagaaaaatgctgaagtagctaaagtaactgcagcaacaacacgtgatgaagtgagaaatattcgtcaagaagcaacaacattagatactgcaatgcttggtttacgtaaaagcattaaagataaaaacgatactaaaaatagtagtaaatatattaatgaggatcatgaccaacaacaagcttatgacaatgctgtaaataatgctcaacaagttatcgatgaaactcaagcaacgttaagctcagatacaatcaatcaattggcaaatgccgtaactcaagctaaatctaatcttcatggagatactaaactacaacacgataaagatagtgctaaacaaacgattgctcaattacagaatttgaattcagctcaaaaacatatggaagattctttaattgataatgaatctacacgtacgcaagtccaacacgatttaacagaagctcaagctttagatggtttaatgggtgccttaaaagaaagtattaaagattatactaatattgtttcaaacggtaattacatcaatgcggaaccatctaagaaacaagcatatgatgcagctgtacaaaatgctcaaaatataataaatggaacgaatcaaccaacaattaataaaggtaatgtcactacagcaacacaaaccgtgaaaaatactaaagatgccttagacggtgatcatagattagaggaagctaaaaataatgccaatcaaacaatcagaaatctatctaatttgaacaatgcccaaaaagatgcagagaaaaatctagttaatagcgcatcaacattagaacaagttcaacaaaacttacaaaccgctcaacaattagataatgctatgggtgagttacgacaaagtattgctaaaaaagatcaagtgaaagcagatagtaaatatctaaatgaagatcctcaaattaagcaaaactatgatgatgcagttcaacgtgttgaaactattattaacgaaactcaaaaccctgaattacttaaagcaaacattgaccaagcaactcaatccgttcaaaatgcagaacaagctttacatggtgctgaaaaattaaatcaagacaaacaaacgtcttcgacagaactagatggattaacagatttaacagatgcacaacgtgaaaaactcagagaacaaattaacacttctaatagtagagatgatattaagcaaaaaattgagcaagcaaaagcactaaatgacgcaatgaaaaaacttaaagaacaagttgcgcaaaaagatggtgttcatgctaacagtgattatacaaatgaagattctgcacaaaaagatgcgtataataatgcacttaaacaagcggaagacattattaataacagctcaaatcctaacttaaatgcacaagacattactaatgctttaaataatattaaacaagcacaagataaccttcatggagctcaaaaattacagcaagacaaaaatacaactaatcaagccattggtaacttaaatcatcttaatcaacctcaaaaagatgcgcttatacaagctattaatggagctacatctagggaccaagttgcagaaaaacttaaagaggccgaagcgcttgatgaagctatgaaacaacttgaagatcaagtgaatcaagatgatcaaatttcaaatagcagcccattcataaatgaagactcagacaaacaaaaaacttataatgataaaatccaagctgcaaaagaaataattaatcaaacatctaatccaaccttagataaacaaaaaattgctgatacacttcaaaatattaaagatgcagtgaataatttacatggtgatcaaaaattagctcaatctaaacaagatgctaataatcaattaaatcatttagatgacttaaccgaagaacaaaaaaaccattttaaaccgttaattaataatgctgatactcgagatgaggtaaataaacaactagagattgctaaacaattaaatggtgatatgagtacacttcataaagtcataaatgataaagatcaaattcaacatttaagcaattacattaatgctgataatgataaaaaacaaaattatgataatgctattaaagaagctgaggatttaattcataatcatccagatacattagatcataaagcattacaagatttattaaacaagatagaccaagcgcataacgaattaaatggagaatccagatttaaacaggctttagacaatgctttaaacgacatagatagcttaaacagtctcaatgttccacaacgccaaactgttaaggataacatcaaccatgtgacaactctagaaagtttagctcaagaattgcagaaagcaaaagagcttaatgatgctatgaaagcaatgagagatagcattatgaatcaagagcaaattcgtaaaaatagcaattatactaatgaagacttagctcaacaaaatgcctataatcatgcagtagataaaataaataacattattggtgaagacaatgcgacgatggatcctcaaataatcaaacaagcaactcaagatataaatacagctataaatggattaaatggagatcaaaaacttcaagatgcaaagacagatgctaaacaacaaattactaactttactggtttaactgaaccacaaaaacaagcattggaaaacatcattaaccaacaaacaagcagagcaaatgttgctaaacagttaagtcatgctaaattcttaaatggaaaaatggaagaattaaaagttgcagtagccaaagcgtcattagtaagacaaaatagtaactatattaatgaagatgtctctgaaaaagaagcatatgaacaagctatcgcaaaaggtcaggaaataattaattcagaaaataatccaacaataagtagtactgatatcaatcgtaccattcaagaaattaatgatgctgaacaaaatcttcatggtgataataaattaagacaagcacaggaaattgcaaagaatgaaatacaaaatctagacggattaaattcagctcaaataacaaaattaatccaagatataggcagaacaacaactaaacctgcagtaactcagaaactagaagaagcaaaagcaataaaccaagctatgcaacaacttaaacaaagtatagccgataaggatgctactctaaattctagtaactatctcaatgaagattctgagaaaaagttagcgtacgataatgctgtaagccaagctgaacaactcataaatcaacttaacgacccaactatggatataagtaatattcaagctattactcaaaaggtcattcaagcaaaagattcattgcacggtgcgaataaacttgcacaaaatcaagcagattcaaatttaataataaatcaatcaacaaatttaaatgataaacaaaagcaagcattaaatgacttaattaatcatgctcaaactaaacagcaagtggcagaaataattgcacaagctaataagttaaataacgaaatgggcacactaaaaacactcgtagaagaacagtcaaacgttcatcaacaaagtaaatatattaatgaagatccgcaagttcaaaatatttataatgactccattcaaaaaggtcgagaaatattaaacggcactacagatgatgttttaaacaacaataaaatagcagatgccattcaaaacattcatttaactaaaaacgatttacatggtgatcaaaaattacaaaaagcacaacaagatgcaaccaatgaattaaactatttaacaaatctaaacaattctcaaagacaaagcgagcatgatgagattaactctgctccttcaagaactgaagtttctaatgatttaaatcatgctaaagcacttaatgaagctatgcgtcaacttgagaatgaagttgctcttgaaaacagtgttaaaaaattaagcgactttatcaatgaagatgaagcggcacaaaatgaatatagtaatgcacttcaaaaagctaaagacattatcaacggcgttccaagtagcactttagataaagctacaattgaagatgctttattagaattgcaaaatgctagagaaagtttacatggtgagcaaaaacttcaagaggctaaaaatcaagctgttgctgaaattgataatttacaagcattaaatcctggacaggttcttgctgaaaaaacattagttaaccaagcatcaaccaaaccagaagttcaagaagccttacaaaaagcaaaagaacttaatgaagctatgaaagcactgaaaactgaaataaataaaaaagaacaaatcaaggctgatagtagatatgtaaatgctgacagtggtcttcaagcaaattacaattctgcgttaaattatggttctcaaattattgcaactacccaaccaccagagcttaataaagatgtaataaatagagcaactcaaacgattaaaactgctgaaaataatttaaatgggcaatctaaattagcagaggctaagtcagacggaaatcaaagcatcgaacatttgcaaggattaacacaatcacaaaaagataaacaacatgatttaattaatcaagctcaaactaaacaacaggtagatgatatcgtaaataactctaaacaattagataactctatgaatcaactacaacaaattgttaacaatgacaatacagtaaaacaaaatagtgatttcattaatgaagattccagccaacaggatgcttataatcatgcaattcaagcagcaaaagatttgataactgctcatccaactatcatggataaaaatcaaatagatcaagctattgaaaatatcaaacaagcacttaatgatttacacggtagtaataaactatcagaagataaaaaagaagcttcagaacaactacaaaaccttaatagcttgacgaacgggcaaaaagatacgattttaaatcatattttcagtgcaccaacaagaagccaagtaggagaaaaaattgcaagtgctaaacaattaaataatacaatgaaagcacttagagattctattgctgataataatgaaattttacaaagtagtaagtacttcaatgaagattctgaacaacaaaatgcttataatcaagccgtaaataaagctaaaaatataattaatgatcaaccaacaccagtaatggcaaatgatgagattcaaagtgtcctaaatgaagttaaacaaactaaagataatttacatggtgatcaaaaacttgctaacgacaagacagatgctcaagcaacattaaatgcgttaaattacttaaatcaagcgcaaagaggtaatcttgaaactaaagttcaaaactctaattctagaccagaagtacaaaaagtagttcaattagcaaatcaacttaatgatgcgatgaaaaaattagatgatgctttaactggtaatgacgcaataaaacaaacgagtaattatattaatgaagatacttctcaacaagttaactttgatgagtatacagatagaggtaaaaacatagttgctgaacaaacaaatccaaatatgtctccaactaatattaacactattgctgataaaattactgaagctaaaaacgatttacatggcgtacaaaaactaaaacaagctcaacaacagtccatcaatactattaatcaaatgactggtctaaaccaagctcaaaaagaacaattaaatcaagaaattcaacaaactcaaacccgttctgaagtacatcaagtaattaataaagcacaagctttaaatgattcaatgaatactttacgtcaaagtattactgatgaacatgaagttaaacaaacaagtaactacatcaatgaaactgttggtaatcaaactgcatataacaatgccgttgatcgtgtaaaacaaataatcaatcaaacatctaatccaactatgaatcctttagaggtggaacgtgcaacatcaaatgtaaaaatttctaaagatgcacttcatggtgaacgtgaattgaatgacaataaaaattcaaaaacttttgcagtcaatcacttagataacctcaatcaagctcaaaaagaagcattaactcatgaaattgaacaagcaactatagtttcacaagtaaataatatctataacaaagcgaaagctttaaataatgatatgaaaaaacttaaagatatcgttgctcaacaagataatgtgagacaatcaaacaattatataaacgaggatagtacacctcaaaatatgtacaacgatacaattaatcatgcacaatcaatcattgatcaagtagcaaaccctacgatgtctcatgacgaaatagagaatgcaatcaataacataaagcatgccatcaatgcactcgatggagaacataaattacaacaagcaaaagaaaatgcaaacttattgattaatagtttaaacgatttaaatgcaccacaaagagatgccataaatagattggttaatgaagctcaaacaagagaaaaagtagctgaacaacttcaaagtgctcaagctttaaatgacgctatgaagcatttaagaaacagcattcaaaatcaatcatccgtaagacaagagagcaaatatattaatgcaagtgatgctaaaaaagagcaatataatcacgcagttagagaagtcgaaaatattatcaatgaacaacatccaacattggataaagaaataattaagcaactaacggatggtgtaaatcaagcgaataatgacttaaatggcgttgaattattagatgctgataagcaaaacgcacatcaatcgatacctacattgatgcacttaaatcaagcacaacaaaacgcattaaatgaaaaaattaataacgcagttaccagaactgaagttgcggctattattggccaagcaaaactactcgatcatgctatggagaatttagaagaaagtatcaaagataaagagcaagtcaaacagtcaagtaactatattaatgaagattctgatgttcaagaaacatacgataacgccgttgatcatgtgacagaaatacttaatcaaacagtaaatccaactttatctattgaagatatagagcatgctatcaacgaagttaatcaagcgaaaaaacaactcagaggtaaacaaaaactttatcaaactatcgatttagctgataaagaattaagtaaattggatgatttaacatcacaacaaagcagttcaatatctaatcaaatatatactgctaaaacgagaacagaagttgcccaagcaattgaaaaagcaaaatcattaaatcatgcaatgaaagcacttaacaaagtatataaaaatgcagataaagtgttagatagtagtcgattcattaacgaagatcaacctgaaaaaaaggcgtatcaacaagctataaatcatgttgattcaatcattcatagacaaacaaatcctgaaatggatccaacagtaatcaatagcataactcatgaactcgaaacagctcaaaataacttacatggtgatcagaaacttgctcatgcacaacaagatgccgctaatgtaattaatggtctaattcatcttaatgttgctcaacgtgaggtaatgataaatacgaatacaaatgctacaacacgcgaaaaagttgcaaagaacttagataatgctcaagctcttgataaagctatggaaacactacaacaagtagttgctcataaaaataatatattgaacgatagtaaatatttaaatgaagattcaaaatatcaacaacaatacgatcgagttattgctgatgccgaacaactacttaatcagacaacaaatccaacattagaaccttataaagtcgatattgttaaggataatgtcctagctaacgaaaaaatactatttggcgcagaaaaactatcatatgacaaatcaaatgcaaatgatgaaattaaacatatgaattatcttaataatgcacaaaagcaatctataaaagatatgatttctcacgcagcattaagaactgaagttaaacaacttctgcaacaagctaaaatccttgatgaagccatgaaatcacttgaagataaaactcaagtagtgattacagatactactttgcctaattacactgaagcttcagaggataaaaaggaaaaagtagaccaaactgtatcacatgctcaagcgattattgataaaataaatggctcaaatgtaagtttagatcaagtacgacaagcactagaacaattaactcaagcatcagaaaacctcgatggtgatcagcgagttgaagaagctaaagttcatgctaatcaaacaattgatcaattaacacatcttaattcattacaacaacaaactgcgaaagaaagtgttaaaaacgcaacaaaactagaagaaatcgctactgttagtaacaatgctcaggcattaaacaaagtaatgggtaaattagaacaattcattaatcatgctgattctgttgaaaatagtgataattatagacaagccgacgacgacaaaatcatcgcttatgatgaagcacttgaacatggacaagatatacaaaaaactaacgcaacccaaaatgaaacaaaacaagcgttacaacaattaatatatgcagaaacatcgttaaatggtttcgaaagattaaatcatgctagaccacgagctttagaatatatcaaatcactagaaaaaataaacaatgctcaaaagtctgctttagaggataaagtaacgcaatcgcatgatttattagaattagaacatattgtcaacgagggcacaaacctcaatgacattatgggtgaattagctaacgcaatcgttaataactatgctccaaccaaagcaagtataaattatattaacgccgataacctacgcaaagataactttactcaagctatcaacaatgcacgtgatgcactcaacaaaactcaaggtcagaacttagatttcaatgcaattgatacatttaaagatgatatattcaaaactaaagatgcacttaacggtattgaacgtttaacagctgcaaaatcaaaagcagaaaaactaattgatagtttaaaatttattaataaagctcaattcacacatgcaaatgatgaaattatgaatactaattctattgcacaattgtctagaatcgtgaatcaagcatttgatttaaatgatgcaatgaaatctttaagagatgaacttaataatcaagcttttcctgtccaagcaagctcaaattatataaattcagatgaagatttaaaacaacaatttgaccatgctttaagtaatgctcgaaaagttcttgcaaaagaaaatggtaaaaatttagatgaaaaacaaattcagggactcaaacaagtgattgaggatactaaagatgctttaaatggtatccaacgtttatcaaaagctaaagctaaagcaattcaatacgtacaatctttatcttatatcaatgatgcacagcgtcatattgctgaaaataatattcacaactctgatgatttatcatctttagcaaatacattatctaaagctagtgatttagataatgcaatgaaagacttacgagatactatagaaagtaattcaacttctgttccaaatagtgtgaattatattaatgctgataagaatttacaaattgaatttgatgaggcgctacaacaagcaagtgcaacaagttctaaaacttcagaaaatccagcaacgattgaagaagtattaggtcttagtcaagccatttacgatacaaaaaatgcattaaatggtgaacaacgacttgcaactgagaagagcaaagatctaaaattaataaaaggattaaaagatttaaataaagcacaacttgaagatgtcacaaacaaggtaaattcagcaaatactttaacagagttatctcagctcactcaatcaacgttagaattaaacgataaaatgaaattattgagagataagcttaaaactttagtaaatcctgttaaagcaagtttaaattatagaaacgctgattataatttaaaacgtcaatttaacaaagctttaaaagaagctaaaggcgtattaaataaaaatagcggtacaaatgtcaatatcaatgacattcaacatcttttaacacaaatagataatgctaaagaccaattaaatggtgaacgacgtctaaaagaacatcaacaaaaatctgaagtatttattattaaagaattagatatacttaataatgctcaaaaagctgcaataattaatcagattagagcgtctaaagacattaaaataattaatcaaatcgttgataatgcaatagaattaaatgatgctatgcaaggtttaaaagaacatgtagctcaattaacagcaactacaaaagacaacattgaatatttaaatgctgatgaagaccataaattacaatatgattacgctatcaacttagcgaataatgttcttgacaaagaaaacggtacaaataaagacgctaatatcataattggagtgattcaaaacatggatgatgctagagcacttctaaatggaattgaaagacttaaagatgctcaaacaaaagcacataatgacattaaagatacgctcaaacgtcaacttgatgaaattgaacacgctaatgcaacatcaaattctaaagctcaagctaaacaaatggtaaatgaggaagctagaaaagcgctttctaatattaatgacgcaacatcaaatgatttagttaatcaagcaaaagatgaagggcaatctgcaattgaacacatacatgcagatgaattacctaaagcaaaactagatgctaatcaaatgattgaccaaaaagttgaagatataaatcacttaattagtcaaaatccaaacttatcaaatgaagaaaaaaataaactaatatctcaaattaataagttagtaaatggaattaagaatgaaattcaacaagctataaacaaacaacaaatagaaaatgctacaacaaaactagatgaagtcattgaaactactaaaaaattaattatcgccaaagcagaagctaaacaaatgataaaagagttatcacaaaagaaacgagatgcaataaataacaacactgatttaacaccttctcaaaaggcacatgctttagcagatattgataaaacagaaaaagatgcacttcaacatatcgaaaattctaattcaattgatgatatcaataacaataaagagcatgcatttaatactttagctcatatcattatttgggatactgatcagcaaccattagtttttgaactacctgaattgagccttcaaaatgctctagtaacaagtgaggtggttgttcacagagatgaaactatttcattagaatctataattggagctatgactttaactgatgaacttaaagtcaatattgtttcattaccgaacactgataaagtagctgatcacctaaccgctaaagttaaggttattttagctgatggctcatatgtcactgtaaatgttccagtcaaagttgtagaaaaagaattacaaatagctaaaaaggatgctataaaaacaattgatgttctggtaaaacaaaaaatcaaagatatagattctaataacgaattaacgtctactcaacgtgaagatgcaaaagctgaaattgaaagattgaaaaagcaagccatcgataaagtgaatcattcaaaatcgattaaagatattgaaacagtaaaacgaactgattttgaagaaatagatcagtttgatcctaaacgctttacgctaaataaagctaaaaaggatatcattactgatgttaatactcaaatccaaaatggtttcaaagaaattgaaacaataaaaggtttaacttctaatgaaaaaactcagtttgataaacaattaactgcactacaaaaagaatttttagaaaaagtcgagcatgctcataatttagtagaattaaatcaattacaacaagagtttaataatagatataaacatattttaaaccaagcacatttactaggtgaaaaacatatagcagaacataaattaggatatgttgtagtaaacaaaactcagcaaatactaaataatcaatctgcttcttactttataaaacaatgggcacttgatagaattaaacaaattcaactagaaacgatgaattcaattcgtggtgcgcataccgtacaagatgtacacaaagcattattacaaggtatagagcaaatcttgaaagtaaatgtaagtattataaatcaatctttcaacgattccttgcataactttaattatcttcattcaaaatttgatgctagattaagagaaaaggatgttgcaaaccatatcgtacaaactgaaacattcaaagaagttctaaaaggaacgggtgttgaaccaggtaaaatcaacaaagaaacacagcaaccaaaacttcataagaatgataatgatagcctattcaaacatttagttgataatttcggcaaaactgtaggtgttattacattaactggtttactttctagtttctggttagttttggctaaaagacgtaaaaaagaagaagaagaaaaacaatcgataaaaaatcatcacaaagatattcgtctttcagatactgataaaatagatccaattgtaataactaagcgtaaaatagataaagaagaacaaattcaaaacgatgacaaacattcaattccagttgctaaacataagaaatctaaagaaaagcaattgagtgaagaggatattcattcaatccccgtcgttaagcgtaaacaaaacagtgataacaaagatacaaaacagaagaaagttacttctaaaaagaagaaaacgcctcaatcaactaaaaaagttgtaaaaaccaaaaagcgttctaaaaagtaa

SEQ ID NO: 7813 - DNA, 879 bp, Staphylococcus epidermidis
atgcctcaaagagtattgctcgttgatggaatggctttattatttagacatttttatgcaacaagcttacacaatcaatttatgtacaattctaaaggaattcctacaaatggtattcaaggttttgtaagacatatttttagcgctatcaaggaaatcgaacctactcacgtagcagtttgttgggatatggggcaagaaacattcagaaatgaaatgtatgatggctataaacaaaatcgcccagcacctcctgatgaacttattcctcaattcgattatgttaaagaaatatcccatcagtttggttttgtaaatgttggtaagcgtaattatgaagctgatgatattattggcagtttagcggaaacatattcacaagaacatgaagtttatatcattaccggagaccgagacttactccaatgcattaatcataatgtagaagtttggcttataaaaaaaggttttacaatctatcaacgttacacgcttgatcgtttcattgatgaatacgggcttaatcctcaacaattaatagatgttaaagcttttatgggtgatacagcagatggctattctggtgtaaaagggataggtgaaaaaacagcaattaaattaattcaaaatcatggaactgtcgaaaatgtagtgaacaatttatcatcattaactcccgctcaacagaaaaaaataacaaataatttaaatcatctgcatttatcaaaatcactcgcagaaatatataccaaagttccaattgaaacagacaaactttttaaagagatgacatatgctcatacactaaatgagattttatccatttgtaatgaacatgaactatacgtttcaagtaaatatattgcaactcacctctaa

SEQ ID NO: 7814 - DNA, 3438 bp, Staphylococcus epidermidis
atggcaataaatgaacaattagatactttatataaattaaaaaaagaattggaaaaatctaataacagacctttaattaataccattaatcaagtaataaaaaaagtttatttaaatcaatacaccgcaacatttgtaggacatttctcagctggaaaatcaacgttaattaatttgttattagaacaagatatactaccaagttctccagtaccaacaacgagcaatacagctatcgtttcagtagccaaggaagacgaaatcattgccaatcttacgcaacaacaatatacaaaattaaaaacgtacaacgatgttaaacaaatgaatcgacaaaatgtcgatgtagaatcgatagaaattaattttccatcaaacaaatttaatctagggtttacatttcaagatacaccgggtgttgactctaacgttgcaacgcatcagtcgagtacagagcaatttatgtatacaagtaacttgttgttttatacagtagactataatcatgtccaatcagcgttgaactttaaatttatgaaacgtattaatgaagttggtataccaattatttttgtgattaatcagattgataaacataatgaagaagaaattacatttgaaacttttaaatcaagagtcgaaaaatcaatcaaagactgggatatcaaacttcaagatacttattacgtttcaaagtttgatcatccacagaatgaaattgacaaactttcaaattttctagtatttatggatcaacatcgtgaatcaacagaagactatgttaatagaaccattcaattcattaccgacgcacaatacatatacattcaaaatgaaatgcaatctattcttgacacccttcaaattaatgaagaacaattcgaggaagcatatattcaatttcaacaaaatcaagaagtcagcgcagaagcacaattgctcaatgactctaatcaattatttaattatttaaaacagaagcgtaaagatatattagataatgcttatatcatgacgtacgatatgcgtgaatctttacggaattatttagaaagcatggcaactgattttaaagtgaatgtattttttaataaaaggaagaaaaaagaagaagaacaaatcaaacgacttaatgaggcgaccactcaattgcaagagaaagttaatcaacaagtacgacaaccacttcgtgaagatatgtcatttttaactagattcataaataaacatgctgtgaatgaaaaaatactaaatcaagaatatgacgtcgttccgtcacttatatcagagctatatcaaactcaaacgagcattagcaacacatacgttttaacattttcagatgaagttataaaagctttgaataaaaaaatagaaaatgagtcaacaccactatttgaagaagctgtcaatcatgtacaagttaatgaattatcgagtgatgaaaatgaagataggtatgaatatgatagatacattgaacttaacacattaaaggattcgcttacatcccacaactacaaacattactatatccatttagacgattctttagataaattaattggaagaacagagactcattttgaacttaaacaagaaaattcaactgcttatcatcgtaaacatgagacacaacatcgtaacgagtttgttacatctaatcaagatattaagcgtgcattagatatcgttaaagatgtaccattatttgatcgcactaaacaagatatcaccgataccattctgagactcgataatcaaataacaaaagtaggtgtttttggtacatttagcgcaggtaaaagcagcttaatcaacgctctactaggtgataactatttagttagttctcctaatccaacaacagcggcaacgacggaattatcatatggtaaagagagtcaaatcacattaaaatctaaagagcaattactagaggaagttaatcatgtactagaattttatgaaatatcgtttaacaccttagacaactttattaagagcgatttagagaagttaaaatcgaaactagaaaagaaccaacttgcatttattagtgcaattgagaaacattatgaaatgtacacgtcaatgctagaacattcacttatacacacagtatcgcttgaagaaattaaaaagtggagtgccgaggatgagtatgccactttcgtgaaaactgtacaccttaagctacctttagattggcttaagggtaaaatcattattgattcactgggtttacattccaataatcaaagacacacgaatgaaactgaacaaattctcacttcttctgaccttattttgtatgtaacttacttcaatcattcatttacagataacgacaaagcctttatcgaacatatgaaagatatgaatcaattaaatgaaaatcaagcttttaaaatgataattaatgcggttgacctagctgaagataaacaggatatacaagccgttgaggattatgttgcagatgcactggggcaagttaacttacactctgatatatatagtgtttcaagtcgtcaaagtttaaatgggaataacattggcataaatgaattaagagaaagtatacaatactttgcaaaggttgaatctagaacaattttagagcagcagatgacttatcaattgcaacaaatgaataactcctttaaaaaaatgattaaagattttcacgatgacaacgcaaaattatcagctagacaacataaattaaatcactataaaaaccaaaccctattaaatcaagagttgattgatacaactgcacaacgtactttcaatgaagtagaagaacaagtatatcatctaaatgaacggttaaaactacaacttttagatgaggttaaatctgtgtttaatagtcagatgacacaaaataacgactttaatgaggaaaagaaaatttcaactaaaatatatttagatcaaattcatcaacgcttattcttagagcaatcacttatcacagaaaggattaaaaaatattttaattcacaactagaagaacaaatcctaccagtcatgaaaaagttaaatcagattcatgttattataaatgcaaaatttaatgttgagccatcactggttgatacggcgttacttcaaattgaacttaattcaatgttgcaatcactaccaaaacagttaactaaacgtaaaatagttaatccaaagtcacaaaaggatatacaagtacacatagctaatcaaactcttgaattattacaagatgatttgaactcattgcgccgacaattaaatgattatatccatgagatgactcaacttgccgaacatcaatttcaaatgttggagacatccattcaacaacaaattgatgagttactttcattcactatcgatgatacattaatacaacaactagaattgaaaacgacacaattagacaatattttatag

SEQ ID NO: 7815 - DNA, 639 bp, Staphylococcus epidermidis; identical to SEQ ID NO: 4848

SEQ ID NO: 7816 - DNA, 1137 bp, Staphylococcus epidermidis
atgtttcaattattagcagtatgtccaatgggattagaagcagttgtagctaaagaaatacaagaattaggttacgatacacaagtagaaaacggtcgtatcttttttgaaggtgatgaaagtgctattgttagatgtaacttatggttacgtaccgcagaccgaataaaaattgtaatgggtcgattcaatgctactactttcgacgaattatttgagcaaacaaagtcattaccatgggagaccgtaattgacaaagaaggtaatttcccggttcaagggcggagtgtaaaatcaacattatatagtgtacctgactgccaagcaattactaaaaaggctatagtagaacgacttaagcatgctcatcaagaaaaaggatggctaagtgaaacaggcgccaaatatcctgtagaagtagcaatattaaaagataatgtattattgaccattgatactgctggttctggactcaacaagcgaggttatcgcattgctcaaggtgaagcacccattaaagaaacattggcagcaagcctcattcgtttagcaaattggaatggtaacacacctttaattgatcctttctgtggttcaggcaccattgctattgaagcatgtcttattgcacaaaatattgcacctggttttaatagggattttgtatctgaacaatggaatatgatgccacctaatatttatgacaaatttcgtgatgaagctgatcaattggctgactatgataaagacatacaagtatatgcttctgatattgatccagaaatgattgaaattgcaaaacgtaatgcagaagaagttggtctcggagatatcatacagttcaatgttaaagatgtgaatactttgtctattgataccgacaagcctgtagcacttgttggcaatccaccgtatggtgaaagaattggagatcgtgaagaagttgaagaaatgtatcgttatataggtacacttttgaaacaacatcctcatttatcggcctacatattaacaagtaacaaagaatttgaatacttagttaatcgaaaagcgactaaaagacgtaagttgttcaacgggtatattgaatgtacgtactatcagtattggggtaaaaagcaaagtaataaaaattaa

SEQ ID NO: 7817 - DNA, 339 bp, Staphylococcus epidermidis
atgtcagatgtttcattaaaattatcagcgaaagatatttatgaaaaagatttcgaaaaaactatggcaagaggctatagaagagaagaagtagacgcttttttagatgatatcattacagattatcaaaaaatggcggatatgaacaatgaagtagtaaagctttctgaagaaaatcacaaattaaaaaaagaacttgaggaattaagattacgtgttgctacatcaagaccacaagacaataaaaacttttcttcaaataattcaagcagtgcttcaaataatgtagatattttaaaacgtatttcaaaccttgaaaaagcagtattcggcaaataa

SEQ ID NO: 7818 - DNA, 567 bp, Staphylococcus epidermidis
atggttaaaactgtttatattactggttataaatcttttgaactgaatatctataaagacgatgcgccagaagtatattatttaaagcaatttatagctcataaattaaaacatcttttagatgaaggtttagagtgggtattgatacaaggacaaatgggtatagaattatggtctgctgaagtagtgattgaactaaaaaaagacttcccagatattaaactaggtataattacgccatttataggtcatacacaacgatggaatgataagaatcaagctaagtatacaaatattatacaacaagccgattttactgaaagcattcatcacactgagtatatgggtgcctatcaatttaaacaagcagatcaattcatgcttgatcataccgattacactattttaatttatgatgatgaacaagaggcaagccctaaatactttaaggctatgttagttgaatttatggaaaaaacaaactatacttgtgatattgtgacgtttgatgaactcactgacttcatcaacgacttgcagtggtctcaagatcaaagtttcgaatga

SEQ ID NO: 7819 - DNA, 333 bp, Staphylococcus epidermidis; identical to SEQ ID NO: 5917

SEQ ID NO: 7820 - DNA, 627 bp, Staphylococcus epidermidis; identical to SEQ ID NO: 5918

SEQ ID NO: 7821 - DNA, 2232 bp, Staphylococcus epidermidis
atgacggaaaataaagggtcttcccaacctaaaaagaacaacaatgggaagtccaatggaaaaaagaataggaatgtaaagagaacgattattaagattataggttttatgattattgcctttttcgttctattgctactcggtatcttgttgtttgcttattatgcgtggaaagctccagcatttagcgaatcaaaattagatgatccaattccagcaaagatttacgataaaaacggagaacttgtaaaaacacttgataacggacagcgacatgaacatgtgaatatcaaagatgttcctaaagacatgaaaaacgctgttttagctactgaagataaccgtttctaccaacatggagcattagattacaaacgtttatttggtgccattggtaaaaacttaacaggtggatttggttcgcaaggtgcgtctacacttacacaacaagttgtaaaagactcattcttgacacaacaaaaatctatcggtcgtaaagcacaagaagcttatctttcttatagattagaacaagagtacagcaaagatgaaatattccaagtttacatgaataagatttattattcggatggcgttactggaattaaggccgccgctaaatattacttcaacaaagatatgaaggatttaaatttagctgaagaagcttatctagctggtttacctcaagttcctaacctttacaacatttacaacaatcctaaggaagctaataatcgtaaagatactgtgctttatcttatgcataaacataaccgtattaatgataaacaatatgcggatgcgaagaagattgatcttaaagctaacttagttgaacgtactaaaaaagaacgtcaagtcactggaaatgaaaaaaatcctgagtatgattcttacgttaatttcgttcaatctgaattaatgaataacaagtactttaaggataaaaatttaggttcagttcttcaaagtggtataaaaatttatactaatatggataaagatgttcaacaaacgttacaagatcgaattaacaatggttctttctacaagaatgaagaccaacaagttggtgcaacaattctagatagtaaaactggtggattagttgcgatctcaggtggacgtaattataaaaatgttgttgaaagaaaccaagctactgaccctcaccctactggttcatcattaaaacctttcttagcttatggacctgcaatagaaaatatgaagtggtcaacaaatcatgcgattcaagacgaatcatcatattgggtagatggttctcaattcaagaactatgatacgaaaggccatggaacagtttctatctatgatgcattgcgtcaaagtttcaatattccagctttaaaaacttggcaacaagttaaaagtcaagctggtaatgatgcacctcagaaatttgcatctaaattaggattggattatagtggcaaaattggaccttctgaagtattaggtggatcttcatcagaattctcacctactcaactagcttccgcttttgcagcaatagcaaatggtggtacttataataacgcgcattcaatacaaaaagttgttactcatgaaggagatacaattgagtatgaacatacgagtcacaaagctatgaaagactatacatcatatatgttagctgaaattcttaaaggtacatttaaagcatatggttcggcttatggacatggtgtgtcaggcgtaaacatgggtgcgaaaactggtactggtacgtatggacaagaaatatacgaaaagtataatttacctgataatgctgccaaagatgtttggattaatggtttcagtccagaatatactatgtcggtatggatgggcttcaataaggttaaacaatatggaacaaattcatttatcggtcattcagaacaagattatccacaatacttgtatgaagatgtgatgtctagtatctcatctaaagatggtgaagatttcaaaaagcctaatgatgtacaaggaagttcaccggacagtctatctgtatcaggtcattctgataataatactactaaccgtagtgttcatggaagtagcgatacatcttcttcatcaaatggtggctctaactcagcatcaagtggaaacaactcgaatagttcgaatggtaccagtcaaggtaactcaggcaatgcatttacacgtctgttcaatttaaactctatattcgattataaagtttcataa

SEQ ID NO: 7822 - DNA, 333 bp, Staphylococcus epidermidis; identical to SEQ ID NO: 3255

SEQ ID NO: 7823 - DNA, 660 bp, Staphylococcus epidermidis; identical to SEQ ID NO: 5921

SEQ ID NO: 7824 - DNA, 687 bp, Staphylococcus epidermidis; identical to SEQ ID NO: 3257

SEQ ID NO: 7825 - DNA, 1293 bp, Staphylococcus epidermidis; identical to SEQ ID NO: 3258

SEQ ID NO: 7826 - DNA, 2709 bp, Staphylococcus epidermidis; identical to SEQ ID NO: 3259

SEQ ID NO: 7827 - DNA, 972 bp, Staphylococcus epidermidis
atgtcaaaatatagtcaagacgtcattagaatgttgtatgaacatcaatcaaattacatatcagggcaatatattgccgatcaactcaatatttctagagcaggtgtcaaaaaagttattgacctattaaaagaagatggttgtgatatcaagtcaataaaccacaaaggccatcaactgaattcattacctgatcagtggtatagcggtattgtaaaacctattctcgatgaacttggcctttttaatcatctagaagtttatcacactgtagattcaacacaattaaaagcaaagagagcactcgttggaaataaagatacttttttaattttgagcgatgaacaaaccgaaggtagaggtagattcaatcgtaattgggaatcatctaaaggaaaaggcttatggatgtcactagtgctaagacctgacgtacctttttctatgatacctaaatttaatttatttattgctttaggtattagagatgctattcaacaattttcgaacgaacgtgtaacaattaaatggccaaatgatatatatattggtaataaaaaaatttgcggatttttaactgaaatggttgcaaattatgatgaaatagaagcaataatttgtggtataggtataaatatgaatcatgttgaaagtgattttgacgaggatattaaagataaagcaacaagtatacgcatgcattccgatagtataattaatagatatacttttttaactgcattattaactcaaattatacatcgctttgatcaatttttacatcaaacttttgagtcaattcgagaagaatatattcacgctacaaatatatggcatcgtcaacttaaattcactgaaaataatcatcaatttttgggggaagccatagatattgattcagatggattccttattgttaaagatgaaaaaggtcaattacatcgacttatgagtgcagatatagatttataa

SEQ ID NO: 7828 - DNA, 1203 bp, Staphylococcus epidermidis; identical to SEQ ID NO: 3261

SEQ ID NO: 7829 - DNA, 1113 bp, Staphylococcus epidermidis
atgggtggttctggcattattgctacagaactcggtattaaaatggcagaacgtggccatgaagttcactttattacctcaaacataccctttagaatacgcaaacctttacctaacatgacgttccaccaagttgaagtcaatcaatatgccgtattccaatatccaccatacgatattacattaagtacaaaaatttctgacgttatacaagaatatgatttagacatattgcatatgcattatgctgtacctcacgctgtatgtggtatattagcgaaacaaatgtcaggtaaaaacgtcaaaattatgacaacactacatggcactgatataactgtgttaggttatgaccatactttacaaaacgcgataaaatttggcatagaacaaagtgatattgtaacaagtgttagccattctctagcacagcaaacttatgaaattatcaatactaaaaaggaaatcatccctatatataattttgtaagggaaaatgaattcccaactcggcataatgaagaattaaaagattgttatggtatttcacctgaagaaaaggtattgatacatgtttctaatttcagaaaagtaaaacgtattgatacagtgattgagacatttgcaaaagttcatgagagtataccatccaagttgatacttttaggagatggtccagaattaatcgatatgcgacataaagcacgagaacttgatgttgaaacacacgtactctttttaggcaaacaaaatgacgtaagcgcattctaccaactatctgatttagtactactcttaagtgagaaagaaagttttggattaactctcttagaagcaatgaaaacaggcgtcttacctatagggagtcatgcaggtggtattaaagaggtcatcagacatgaagaaactggatttatagtagatataggggatagtacacaagctgcaaaatatgctattaaacttttatcaaatccagagttatatcaaaaaatgcaatcacaaatgctgaaagatattgaagcaagatttagttcagatttaattactgaccaatatgaaaactattatcgaaagatgctagaacaaggtgagaacaacaatgagtcatga

SEQ ID NO: 7830 - DNA, 318 bp, Staphylococcus epidermidis; identical to SEQ ID NO: 3263

SEQ ID NO: 7831 - DNA, 696 bp, Staphylococcus epidermidis; identical to SEQ ID NO: 3264

SEQ ID NO: 7832 - DNA, 594 bp, Staphylococcus epidermidis
atgtatcaatggctttgggaaacttcactttatcaaaaatggttgatttcttttattttaatttgcaatatatttggtacgatatacggttatcattggtatagtagtcaattagctaacacaccaaattattttaaattatttgttccagatagtcccactgctacattatttttatgtttatcattattattcatactatttaataagcgttatgccctgattgacgctttagcttttataactctatttaaatatggtagttgggctgtaattatgaatattttgatgtttataaaaatgaatgatattgccataaacggacttatgttgctcatttctcacgcaattatgatattagaagctatctatttttatcctcgttttaaaatatctaaattggctggattgatgagtttcatatgggtgacgatcaatgacgtaatagattacatatacggacaatatccctactatgattttatcgccaaacatttaattgaagtaggggtattggcttatagtctcactatcatttcgtatattttatttttaaaattacaaaagtggttgaaagttaaaacatttgattaa

SEQ ID NO: 7833 - DNA, 564 bp, Staphylococcus epidermidis; identical to SEQ ID NO: 3266

SEQ ID NO: 7834 - DNA, 1245 bp, Staphylococcus epidermidis; identical to SEQ ID NO: 3267

SEQ ID NO: 7835 - DNA, 1302 bp, Staphylococcus epidermidis
atgaataacagtgaaataattaatattaatggaccactcaaaggtgaaatagaagtacccggtgataaatcgatgacacaccgcgctattatgttagcttcattagctaaaggcatatcaaccatttatgaacccttaatgggcgaagattgtcgacgtactatggatatctttaaactattaggtgtaacaattgaagagcaggacaattctatcataatcaattcaccaggatatcaaaatttcataacgccacaccaagtgctctatactggtaattctggtactactacacggttacttgcaggtcttttaagcggattaggcattgaaagtgtgttatctggtgatgtatctataggcaaaagacccatggatagagtgatgaaacctctgttaaaaatgaatgctaatatatctggaattgataataattacacaccacttataattaagccttcaactattaaaggtataaattatcaaatggaagttgcaagtgcacaagttaaaagtgctattttacttgctagcctattttcaaaagaagccacgacacttacagaatttgatgtaagtagaaatcatacagaaacattgtttgcacactttaacattcctatatcaattcaaggtaaaacaatccaaaccataccttatgcaattgaacatatacagcctagagattttcatgttccaggagatatctcatctgctgcatttttcatagtcgcagccctaattacgcccggtagtgacattacaattcataatgttggcattaatcccactcgttcaggtatcatagatatcgttaaacaaatgggaggaaacattgaattaagtaatgtaagcaagggtgcagaaccaactgcatcaatacatgtaaaatatacaccgaacttgaatgctgttacaattaaaggcgacttagttccaagggctatcgatgaattaccagttattgcactactttgcacacaagcttcaaattcttgtattatcaaaaacgcggaagaattaaaagtgaaggaaacaaatcgtatagatactactgcagacatgctaaatttacttggttttaatttacaacccacacatgatggacttattatacatccatcagagtttagatcaaatgcaactgtagatagtcaaacagatcatcgtataggaatgatgttagctgtagcttcactacttagttcagaaccactcaaaatagagcaatttgacgctgttaatgtttccttcccaggttttttacctaaactaaagcttttagaaaatgagggaaaataa

SEQ ID NO: 7836 - DNA, 1065 bp, Staphylococcus epidermidis; identical to SEQ ID NO: 3269

SEQ ID NO: 7837 - DNA, 1167 bp, Staphylococcus epidermidis; identical to SEQ ID NO: 3270

SEQ ID NO: 7838 - DNA, 450 bp, Staphylococcus epidermidis; identical to SEQ ID NO: 3271

SEQ ID NO: 7839 - DNA, 960 bp, Staphylococcus epidermidis; identical to SEQ ID NO: 3272

SEQ ID NO: 7840 - DNA, 726 bp, Staphylococcus epidermidis; identical to SEQ ID NO: 3273

SEQ ID NO: 7841 - DNA, 579 bp, Staphylococcus epidermidis
atggaaacgacaataagcaaactaaacaaacatgtagaacaactgcttaagggcattaatgagtatgagcctattgaaatcaatagctctttaagtcatttattagatatgtactctatcccagatgaagctaagattgcttgcctcactattgatacatcaatgcgtcatttggacgctattggtgataatcatctatctaagaaagcaatattaataggggacctattaagcgctcatttctatactctattagcaaatattcaagattccgcttttcaacttgcaatgagcaaggccattgttaaaatcaatgaagataaatcatcaattaatcaaaatgatctcactgataaagagttgaaagatgcgattctagatatagaaacactatttccatatcttacaattaaccattttggaagttctgttgataaaatcaaattattcgctaaattgacttctaaatataaagattaccatcctgagtatctgggtaagtttaacagatatgaaatagataaatatattcaagaaattagcaaaagttataaaaaaagaggtaatgaaaatggctga

SEQ ID NO: 7842 - DNA, 273 bp, Staphylococcus epidermidis; identical to SEQ ID NO: 3275

SEQ ID NO: 7843 - DNA, 999 bp, Staphylococcus epidermidis; identical to SEQ ID NO: 3276

SEQ ID NO: 7844 - DNA, 1311 bp, Staphylococcus epidermidis; identical to SEQ ID NO: 3277

SEQ ID NO: 7845 - DNA, 1179 bp, Staphylococcus epidermidis
atgactgaagaattcaatgaatcaatgattaatgatattaaagaaggtgacaaagtcactggtgaagttcaacaagtagaggataaacaagttgttgtgcatattaatggtggcaaatttaatggaattattcctattagccagctttcaacacatcatatcgaaaaccctagtgaagttgtaaaagtcggtgatgaagtcgaagcatatgtcactaaaatcgagttcgacgaagaaaatgatactggggcatacattttatcaaaaagacaacttgaaactgaaaaatcttatgaatatttacaagaaaaactagataacgatgaagtgattgaagctgaagttactgaagtagttaaaggtggtttagtcgttgacgttggtcaaagagggtttgtacctgcttctctaatttcaactgatttcattgaagatttttctgtattcgatggtcaaacaatccgtattaaagtggaagaacttgatcctgaaaacaatagagtcattttaagccgtaaagctgtggaacagttagaaaacgacgctaaaaaagcttcaatattagattctttaaatgaaggcgatgttattgatggtaaagttgctcgattaactaactttggtgctttcattgatattggtggcgtagatggtttagttcacgtttctgaattatctcatgaacatgttcaaacaccagaagaagttgtgtcagtaggtgaagcagtcaaagttaaagttaaatctgtagaaaaagattctgaacgtatttctttatctattaaagacactttaccaacaccatttgaaaacattaaagggaaatttcacgaagatgatgttattgaaggtactgtagtacgtttggcgaactttggcgcattcgtagaaattgctccatccgtccaaggtttagtgcatatttctgaaatcgatcataaacatatcggttctcctaacgaagtattagaacctggacaacaagttaatataaaaatattaggtatcgatgaagataatgaaagaatttcattatcaatcaaagcaacgttacctaaagaaaatgtcattgaaagtgacgcatccacaactcaatcatatcttgaagatgataatgatgaagataaaccaacattaggcgatgtttttggtgataaatttaaagaccttaagttttaa

SEQ ID NO: 7846 - DNA, 648 bp, Staphylococcus epidermidis
atgagttcaattaatattgcactagatggcccagctgctgcaggtaagagtacaattgctaaacgtgtagccagtcgtctatcaatgatatatgttgatacaggagcaatgtatcgtgccattacatataaatatttacaaaatggcaaacccgaaaattttgattatctgattaataacactaaacttgagcttacttatgatgaagtaaaagggcaaagaatcttactagataatcaagacgtcactgattatttaagagaaaatgatgtaacacatcacgtatcttatgttgcttctaaagaaccagtgcgttcatttgcagtgaaaatacaaaaagaattagctgctaaaaaaggtatcgttatggatggccgagatattggtacagttgtattaccagatgccgaattaaaagtttatatgattgcatctgttgctgaacgtgctgaacgtcgacaaaaagagaatgagcaacgtggcattgaatcaaatttagaacaattaaaggaggaaattgaagcacgagatcattatgatatgaatcgtgaaatttcgccattacaaaaagccgaagatgctattacacttgatacaactggcaaatctatagaagaggtaacaaatgaaatattatctctactttaa

SEQ ID NO: 7847 - DNA, 969 bp, Staphylococcus epidermidis; identical to SEQ ID NO: 5946

SEQ ID NO: 7848 - DNA, 987 bp, Staphylococcus epidermidis; identical to SEQ ID NO: 3281

SEQ ID NO: 7849 - DNA, 1419 bp, Staphylococcus epidermidis
gtgattgaattaattaaaatggaagggatgatagttgtgtctaataataattttaaagatgatttcgaaaagaatcgtcaatctattaatccagacgaacatcaaacagaattaaaagaagatgataaaacaaatgaaaataaaaaagaagctgactctcaaaacagtttatctaataactcaaatcaacaatttcccccgagaaatgcccaacgacgaaaaagacgcagagagacagcaactaatcaaagcaaacaacaagacgacaaacatcaaaaaaatagtgacgctaaaactacagaaggttcattagatgaccgttatgacgaagcacagttacagcaacaacatgataaatcgcaacaacaaaataaaactgaaaaacaatcacaagataatagaatgaaagatggaaaagatgcagctattgtaaatggaacatctgagtcaccagaacataaatcaaaatcaacacaaaatagacccggccctaaagctcaacaacaaaagcgtaaatcagaaagtacgcaatcaaaaccgtcaacaaacaaagataaaaaagcagctacaggtgctggaatagctggtgcagctggtgttgctggtgcagcagaaacatccaaacgtcatcataataaaaaagataaacaagattctaaacactcaaaccatgagaatgacgaaaaatctgttaaaaatgatgaccaaaagcaatctaaaaaaggcaaaaaagcagcagtcggtgctggcgcagctgcaggagttggtgcggctggtgttgcgcatcataataatcaaaataaacatcataatgaggaaaaaaattctaatcaaaacaatcagtacaatgaccaatcagaaggtaagaaaaaaggtggtttcatgaaaatcttgttaccacttatagcagccattcttattctaggtgcaatagcaatattcggtggtatggctctaaataatcacaacgatagtaaaagtgatgaccaaaaaatagcgaatcaaagtaagaaagactcagataaaaaagatggtgcgcaatccgaagataacaaagacaaaaaatctgatagtaacaaagacaaaaaatctgattctgataagaacgcagatgatgactctgataatagttcctcaaatcctaacgctacttcaactaataataacgataatgtagccaataataactcaaattatacaaaccaaaatcaacaagataatgcaaaccaaaatagcaataatcaacaggcaactcaaggtcaacaatcacatacagtatacggtcaagaaaacttatatcgtatcgccatacaatattatggagaaggaactcaagctaacgtagataaaattaaacgtgcgaatggattaagcagtaataatattcataatggtcaaacattagttattcctcaataa

SEQ ID NO: 7850 - DNA, 1380 bp, Staphylococcus epidermidis; identical to SEQ ID NO: 5949

SEQ ID NO: 7851 - DNA, 939 bp, Staphylococcus epidermidis
atgagtcatgcatttaactacaaaaccaataaaagtatctataatattttaacaggcaagaagtcacaccaaacgtttttcgatgcgtcaagccaacaacttttgtcattatatcatagtttacctaacttaaagtattcaacttttgagcaatttatactccaaaaggatgattttaaaaaatcaattcaagtaaaaatacatccacaatacacttatgatagtctcactcaaacctttagttgcatacaattacttatccaaacgttatctcatacacgcaaggagtcaaatacatttattccaatcgttcaaaatacctatatccaacaaagggttaaacaactttatcatcaggtcattgaatcaaatcaagtatcaaatactatagacgaaatatatttattatttgagaatttaaataataaatataaccatacatttcttcattattatttacaaggatatgaggaatccatgtatactagacaacaaataagtttaattgagagtataccacaatcagaattatttgaacgagaaatgaatgaactgattgacatattgaatcaattaaaagattcaacgaaatatccaatactttctcaagctatcattctttcaccattactaacaaatacatacttaagctatcaaaagttaaaatctggtctcaatttaaaagaaattgctcaattacaaaatgtaaaacttaacacaattgaagatcatattctagaaatgtatattaaaggttatttgatagactatacattatttataaataaaaaagatattctcgaatttataaactactatcaaaaacatcgcggtgaacgattaaaattttataaagaacattttactgattggacttactttcaaattaagttagttatagtaggaatagaaagaggtgatttaattgctgaaagataa

SEQ ID NO: 7852 - DNA, 249 bp, Staphylococcus epidermidis; identical to SEQ ID NO: 3285

SEQ ID NO: 7853 - DNA, 540 bp, Staphylococcus epidermidis; identical to SEQ ID NO: 3286

SEQ ID NO: 7854 - DNA, 1767 bp, Staphylococcus epidermidis
atgaaccgactaaatagtgttgttataaaactgtggttaactattattttaatagtagcgacagttttaattttattaagtgtttcattaatcacttttatacaatattactttacgcaagaaacagaaaatgcaattaaagaagatgccaaaagaattagttcacttgttgagaagtctcataacaaaacattagctatccaaaatagccaaacactcattgatggtgatggaccgggtggcctcattattatgaaagacatgagcgagaaaccagactcatcgtataaagacactaaaaaacaaatgtttaatgaaataaaaaagagtactaaatttaaaaaagtgtttaaagaaggtgagtatgaaactcaaaatattacaataaaaaataaaggtaattctcaatcttatcttttgctaggatacccaatgaaagctcaaaaaggtgctcaaagtcattatagtggtgtttttatatataaagatttgaaatctatcgaagatacaaataatgctattacaattattatattaataactgctattatatttactatagcaagcacaatatttgcattctttttatctaatagaataacgaaacccttacgtcaattaaaaacacaagcacaaaaagtttctgaaggggattatagtcaaatttcaactgtcgctactaaagatgaaataggtgatttatcacgtgcatttaacaacatgaacgtagaaattcaagaacatatcaaagcaatttcttcatctaagaatataagagatacattattaaactctatggtagaaggcgttctaggcattaataatcaacgtgaaatcatattgtcaaacaagatggctgatgatattatgcgtcacattgatgatttttcaaaagaatctattgaacagcaaattgaagcaacatttgaatcacaacagaatgagtatttagaattagaaattaatacaaggtactatgtatttatctccagttatatagatagaattcaaacaaatggtagaagtggtattgtcatggtcatccgtgatatgacaaatgaacataatcttgatcaaatgaaaaaagattttatagcaaatgtatcacatgaattacgtacgccaatctctttattacagggttacactgagtccatagtagacggtatagttaccgaaccagatgaaatacgtgactcattagcaatcgttttagatgaatctaagcgacttaatcgtttagtcaatgaattactaaatgtagctcgtatggatgctgaaggattatcagttgagaaggaattacaacctattcaacaccttcttgataaaatggagtctaaatatcgcatgcaaagtgaagaattaggtttaacaatgacgtttgattctaataatgacgaacaattatggaactatgatatggatagaatggaccaagtgttaactaatttaattgataacgcaacaagatatacacaagctggtgattctataaagatttctattgatgaagattcagatttcaatattttaacaataactgatacaggcactggtatagcaccggaacatctgaaacaagtatttgaccgtttttataaagtggacgctgctcgaaaaagaggtaagcaaggcaccggattaggacttttcatttgtaaaatgattattgaagaacacgggggacgtattgatgttgagagcgaattaggcaaaggtacttcatttattattagactacctaaatcaaaacaaattagttag

SEQ ID NO: 7855 - DNA, 726 bp, Staphylococcus epidermidis; identical to SEQ ID NO: 3288

SEQ ID NO: 7856 - DNA, 738 bp, Staphylococcus epidermidis; identical to SEQ ID NO: 3289

SEQ ID NO: 7857 - DNA, 543 bp, Staphylococcus epidermidis; identical to SEQ ID NO: 3290

SEQ ID NO: 7858 - DNA, 732 bp, Staphylococcus epidermidis; identical to SEQ ID NO: 5957

SEQ ID NO: 7859 - DNA, 525 bp, Staphylococcus epidermidis; identical to SEQ ID NO: 5958

SEQ ID NO: 7860 - DNA, 888 bp, Staphylococcus epidermidis; identical to SEQ ID NO: 5959

SEQ ID NO: 7861 - DNA, 450 bp, Staphylococcus epidermidis; identical to SEQ ID NO: 5960

SEQ ID NO: 7862 - DNA, 543 bp, Staphylococcus epidermidis; identical to SEQ ID NO: 5961

SEQ ID NO: 7863 - DNA, 909 bp, Staphylococcus epidermidis
atgcaaaaaaatattctaaaaagtggcatcgaaatttctgaacttgggttaggttgcatgagtttaggcacagattataaaaaagcgcaaccaattattgaaagtgcaattgataatggtattacgtattttgatactgcagatatttacgatcaaggagttaatgaagaaattgttggtaaagccttaaaaaaatatcaaaatcgtgatgacatcgttatcggaactaaagttggaaatcgattaactgacgatggacatatgacgtgggatccttcgaaaaaacatattaaagaaagtgttaagggatcattgaaacgattaggattaaaccatttagacttatatcaattacatggcggaacaatagatgatcctctagacgaaactattagtgcatttgatgaattaaagcaagaaggatatattcgtgcatatggaatttcatctatacgacctaacgtgatagactattatcttaaaaatagtcaaattgaaacacttatgtcccagtttaatttaatagataatcgccctgaaagtcttattaatgacgttcatgataagcaagttaaaattctagcacgtggccctgtatttaaaggtttattaacttcaaaaagtgttgatgttatagatgaaaaatttaaaaacggtgtgttagattacactcaagacgaattaggtagcacgattgcttctattaaagaattggaaagtaatttaaccgcgttatcatttaaatatttaacttctcatgatgctatggggtcaattattgtaggagctagtagcgttgaacaacttgaagagaatgtccgcaattattataaagaaatcagtttagatcaaatcaaatctgcacgtaatagagttaaagatattgaatatacacaacatttgaaataa

SEQ ID NO: 7864 - DNA, 759 bp, Staphylococcus epidermidis
gtgataggcaaacactttattataactggagcaacgagtgggttaggttttgcaataaccaatgaattacttcaaagaggggcccatgttactatacttgcaagaaatatagataagttcaatcgaatcaaagaaaactattttaaacctgaacatatcaatgtgattaaatgtgatttaatgcaacgaaaagatattgaatcattacaaaaatttttaaatacacctataaatggtttcatctacagttcaggtgttggatattttaagtctataagtgagcattcaactcgtgaagtagtagaaacttacgaggttaatcttacaaattttaatttgttatacaaagtgattcaaccacaattagtaaaagcagcatatatcgttggtatatctagtcaagctgctcttgtttcacaggctaatgcggcacattacggtgcatcgaaagcagggtttagcgccgttcttaatgcattgagattagaacaaccggaattaaaagtgctcaatgtacagcccggtccaatagatacaccattccaaaaaaacgcagatcctactctaaagtattttaaaaattatagacacatgatgatacaacctcaacaacttgccaagcaaatagtggaaggaataatactaaataaaattgaaattaatcaaccatcatggatgcaaataatgcttaaattttatcaattatgtccacgtacactagaaaaattatgtccaaatctatttaaaaataaagtttaa

SEQ ID NO: 7865 - DNA, 816 bp, Staphylococcus epidermidis; identical to SEQ ID NO: 5964

SEQ ID NO: 7866 - DNA, 921 bp, Staphylococcus epidermidis; identical to SEQ ID NO: 5965

SEQ ID NO: 7867 - DNA, 1485 bp, Staphylococcus epidermidis
ttgagtactaaacaaaaacacattccctgtttgattacaatattcggtgccacaggagatttgagtcatagaaagctatttccttctatattccatttatatcaacaagacaatttagatgaacatattgctattattggtataggacgtcgtgattataataacgaacaatttcgcgaccaagttaaagcgtcaattcaaacttatgttaaagatacagatagaattgatgagtttatgacgcatgttttttatcataaaactgacgtgagtgataaagaaagttatcagtcattacttcaatttagtgagcgactagattcagaatttgctttaggtgggaatcgtctgttttacttagcgatggcaccacaattttttggagtgatctcagattaccttaaatcttctggtcttactcaaactacaggatttaaacgcttagttatagagaaaccatttggcagtgatcttaaatctgctgaatcattaaataatcaaataagacgttcgtttaaagaagaagaaatttatcggatagatcactatcttggcaaagatatggtgcaaaatatagaagttttgcgattcgcaaacgcgatgtttgaacctttatggaataataaatacatttcaaatattcaagttacatcatcagaagtattaggtgtcgaagatcgtggtggctactatgaatctagtggtgcacttaaagacatggtacaaaatcacatgctacagatggttgctttacttgcaatggaagcaccgataagtttgaatagtgaagatatacgtgcagaaaaagtcaaagtacttaaatctcttagacaattaaaaccagaagaagttaaaaagaatttcgtgcgtggtcaatatgatcaaggcaatatagatggtaaacaggttaagtcatatcgagaagaagatcgcgtagcaaaggattcggttacaccgacatttgtatcgggtaaattaacaattgataactttagatgggctggagttcctttctacattagaacgggtaaacgtatgaaatcaaaaacgatacaagtcgtagtagaatttaaagaagtacctatgaatttatattatgaaactgacaatttactagattctaatttgctagtcattaatattcaaccaaatgaaggaatttcattgcatttaaatgctaaaaagaacattcaaggaattgatactgagccagtgcaattatcatacgcaatgagtgctcaagataaaatgaatacagttgatgcatatgaaaacttattgtttgattgtcttaaaggtgatgcgactaattttacacattgggaagaattaaaatctacttggaaatttgtagatgcaatccaagatcaatggacaatggttgaaccatgtttccctaactatgaagcgggtacgaatggacctcttgaaagtgatcttttattaagtcgtgatggaaatcattggtgggatgatatccactaa

SEQ ID NO: 7868 - DNA, 882 bp, Staphylococcus epidermidis
ttggacgttatcaagcaaatacaacaggcaattgtatatattgaggatcgtttgttagagccttttaatttgcaagaattaagtgattacgttggtctttctccgtatcatttggatcaatcttttaagatgatagttggtcagtccccagaggaatatgcgcgtgcacgtaaaatgacaatagcagcaaacgatgtagttaatggagctagtcgattaatggatgttgctaagaaatatcgttatgcgaattctaatgatttcgcaaatgattttagcgattttcatggtatctcacctattcaagctacaacaaaaaaagatgaactaaaaatacagcaacgactgtatataaaattatcaacgactgaaaatgcaccctatacatacagacttcaagagactgatgatatttctttagttggctattcaagatttattcctactgagcaattatcaaatccatttaatattccagactttttagaggatctattagtagatggttatattaaagaacttaaacgttataatgatacgagcccgtatgaattatttgtagtcagctgtcctctggaacaaggtttagaaatatttgttggtgttccgagtgaacgttacccttcacatcttgaaagcagatttttacctggtcgccattatgcattgtttaatttacaaggtgaaattgattatgctacaaacgaggcttggtattatattgagtctagcttgcaacttactttaccttatgagcgaaatagtttatatgttgagatttatccacttgatatttcatttaatgacccattcactaagattcaattatggttgcctattaaacaagaaatctatgatttagatgaaggttatcaaaattaa

SEQ ID NO: 7869 - DNA, 1656 bp, Staphylococcus epidermidis
atgaaaagaaattggtggaaagaagcagttgcatatcaagtatatccacgaagttttaatgatagtaatggagatggaataggtgatctacctggattaattgaaaaattagattatctagaaaatttaggaatagatgtcatttggttaagcccaatgtatccatcaccaaacgatgataatggatatgatattagtgactacaaaggcattatgagtgaatttggtacaatgaacgattttgatcaattgttatcaagcatacatcaaagagggatgaaattaatattagacttagtggttaatcacacatcagatgaacacccttggtttattgaatcaaaatctagtaaaacaaatgcaaaaagagattggtatatttgggcagatcctaaaccggatggatctgaacctaataactgggaaagtatctttaatggttcaacttgggagtttgacgaatcgactaagcaatactatttccatttatttagcaaaaagcagccagatttaaattgggaaaatccagatgtaagacaagctgtgtttgaaatgatgaattggtggtttgaaaaaggtattgacggatttagagttgatgccattactcatattaaaaagaattttgaagcaggagatttacctgtacctgatggcaaaaaatttgctccagcatttgatgtagatatgaatcagccaggaatacaagaatggctccaagaaatgaaagataaatcgttaagtcggtatgacattatgactgtaggcgaggctaatggtgttactcctaatgatgctgaagaatgggtaggagaagaaaatgggaaatttaatatgatattccagtttgaacatcttggtttatggagtactggcgatacgaaattcgatgttaaatcctataaacaagtcttaaatcgttggcaaaagcaactagaaaatgtaggttggaatgctttatttatcgaaaaccatgatcaaccacgtcgtgtttcaacctggggtgatgataaaaattattggtatgaatcagcaactagtcacgctactgcctactttttacaacagggcacaccttttatttaccaaggtcaagaaataggtatgactaattatccatttgaaagcattgaaagtttcaacgatgtcgcagtgaaaactgaatatcaaatagtcaaaaaagaaggtggagatgtcaatcaattactagataaatataaaatggaaaaccgagacaatgcaaggactccaatgcaatggaataattctatcaatgctggattcactactggtaagccatggtttcatgtaaaccctaactatacagaaattaatgttaaacaacaactaaatgataagttttcgatactttcttattataaagcgttaattcaactaaaaaaatctgatttgatttacatctacggtaagtttaatatggtcgatgctgaaaataagcaggtttttgcatatacacgcacatttaaaaacaatactgtattaattgtagccaatctcacaaatgaagtatcagaactaaacctaccttttgaattagatatttcatctgtagatataaaattgcataattatcacttaaatgatataaatttagaccatattaaaccttatgaatcattcgtcgttgaaatataa

SEQ ID NO: 7870 - DNA, 1407 bp, Staphylococcus epidermidis; identical to SEQ ID NO: 5969

SEQ ID NO: 7871 - DNA, 1125 bp, Staphylococcus epidermidis; identical to SEQ ID NO: 5970

SEQ ID NO: 7872 - DNA, 978 bp, Staphylococcus epidermidis
atgcttaagttaaatccctataaaataggatttagaactgtcaaaactgctgtgggaatgactttaggagtaatcatatgtaaacttctaggcttagataattatgcatccagtgctattttagttgtattgtgcataaagcacactaagatgcattcagtacaagcaattttatctcgactagtttcatgtttactcatattatttttaggttcagcaatttttagtcttttaggacaacatgcatttgttttaggtttaattgttttgttgtttattcctttgacagttgttctaaatgtgcaggaaggtgttatcactagttgtgtcatattattacatgtctttaacgccaaagctattaatgggcaccttattttaaatgaaataatgctattaatagtgggcttaggtatagcatttctaatgaacttaatgatgcctagtttagataagaaattgaatcattttaagcaggatatagaaaatcaaataactgaaatatttaatatttttagtcaagcctgctcaatgcataatgatcatttaaatattaaatttgattcattacttttaaatattaaaaaagcaaaatcacttgcttttagagatgttaaaaatcactttgtacgaaacgaaaattcattttatcattattttgatatgagagaagaacaagttgaattattaaaacgtatgacatcgttattagaaagaataaatacagatgatcctatactcgaaaagatttcacaattaatgtatgaaattggaagtaacgtaaatagcaatgattatacggctctaagactacattcactttatgaaatacgtttatctctcgatgatttaccattaccgactactcataagactttaaattcccgagcacatattattcaaattctaaatgaactagaagaatacttaaatattaaatctcaatttggttctttaaaattgcatagtgaaatataa

SEQ ID NO: 7873 - DNA, 438 bp, Staphylococcus epidermidis; identical to SEQ ID NO: 3306

SEQ ID NO: 7874 - DNA, 1320 bp, Staphylococcus epidermidis
ttggatataaaaatgcctaagcttggtgaaagtgtgcatgaaggtacgattgaacaatggttagtatcagtaggagatcatgtagatgagtatgaaccattatgtgaagttattacagataaagtaacagctgaagtgccttcaacaatttctggaacaataacagaattagtggttgaagaaggacaaactgtcaatattaacacggtgatttgtaaaatcgattcggaaaatggtcaaaatcaaacagaatcggcaaatgagtttaaggaagaacaaaatcagcattctcaatcaaatgtaaacgtgtcacaattcgaaaataatcctaaaactcatgaaagtgaggtacatacaacctctagtcgcgcaaataacaatggacgattttcaccagttgtctttaaattagcttctgaacatgatattgatttaacacaagtcaaaggaactggttttgaaggtcgtgttactaagaaggatattcaaaatattattaacaatccaaacgatcaagaaaaagagaaagaatttaaacaaacagataaaaaagatcattcaatgaaccatggtgactttttacatcaatcctcaactaaaaacgaagactcaccattatcaaatgaacgtgtcgtaccagttaaaggtattagaaaagctatcgcacaaaatatggttactagtgtcagcgaaataccacacggttggatgatggttgaagctgatgcaacgaatttggttcagactagaaactatcataaagctcaatttaaaaagaatgagggttacaatttaactttctttgcgttttttgtaaaagctgttgcagaggctttaaaagcaaatccattactcaatagtacatggcaaggagatgaaattgttatccacaaagatattaatatctctattgctgttgcagacgatgataagttgtatgtgccagtcattaaaaatgcagatgaaaaatcaattaaaggtattgcgcgtgaaatcaatgatttagctactaaagcaagattaggaaaattagcacaaagtgatatgcaaaacggtacatttacggttaataatactggttcttttggttctgtttcttcaatgggaatcattaatcatccacaagctgccattttacaagtagaatcagtcgttaagaaacctgtagttatagatgatatgattgcaattagaaatatggttaatttgtgtatttcaatcgatcatcgtattctcgatggtgttcaaacgggaaaatttatgaatcttgttaagaaaaaaatagaacaatattctattgaaaatacttctatttattaa

SEQ ID NO: 7875 - DNA, 984 bp, Staphylococcus epidermidis; identical to SEQ ID NO: 3308

SEQ ID NO: 7876 - DNA, 999 bp, Staphylococcus epidermidis; identical to SEQ ID NO: 3309

SEQ ID NO: 7877 - DNA, 1422 bp, Staphylococcus epidermidis
atgtcagaaaaacaatacgatttagtcgtgttaggtggtggtacggcaggatatgtagccgccatcagagcttctcaattaggaaaaaaagtagcgatagtagaaaaatcactcttaggtggtacgtgtttacataaaggatgtatacctactaaagcacttttaaaatcggctgaagtcaatcatactattaaaaacgcgcatacatttggaattgatgtcaatcattttaaaattaatttccctaaaattttagaacgtaaagatgctattgttaagcaattgcatgaaggcgtcaatcaactgatgaaacatcatcatatagatatttataacggtattggacgaattatgggaacatctatattttctcctcaaagcggtacaatttctgtggaatatgaagacggcgaatcagatatactccctaataaaaatgtgcttatagctactgggtcgtcaccacagtctcttccgttcattaaatttgaccataaacaaatactatcgagtgatgatatcctaaggttaaatacactaccacaaagattagcaatcataggtggaggtgttattggtttagaatttgcatctctgatgaatgatttaggtgctgatgtagtagtaatcgaagcgaatgacagagttcttcctaccgagagcacacaagttgcgtcattactaaaagaagaattaactaatcgaggcgttacattctacgaaaatattcaattgaccaaagatcattttaaccaaactgataagggtgtaactattaatatttcagatgagcccgtccaattcgataaagtacttgttgcaattggtagaaagcctaatacaaatgatattggtttaaataacactcaaattaagacttctgatgctggtcatattattacaaatgcttatcagcaaactgaagataaacatatatacgcagcaggagattgtatagggcaattacaattggcacacgtcggttcaaaagaagctatagttgcagttgaacatatgtttgattgttctcctatacctatcaattatgacctgataccaaaatgtgtttatacaaacccagaaattgcttcaattggtaaaaatttagaacaagcaaaaaaagcaggcatcaaagcaaaaagtatcaaagttccttttaaagctataggaaaggcaataattgaggatgtaacccaatcaaaaggattttgcgagatggtagttaacaaagatgacgatgaaatcataggtcttaatatgatagggccacatgttacagaattaataaatgaaatttcattgttacaatttatgaatggctcatctttagaacttggtttaacaacacatgcacatccttcattatccgaggtagtcatggaattaggtttaaaagctaatggtcaagcaattcatgtatag

SEQ ID NO: 7878 - DNA, 1677 bp, Staphylococcus epidermidis
atgttacaaaccttatcaataaaacaatttgccattattgacgaacttgatataaacttttctgacggtctaacagttatgagtggtgaaacaggctcaggaaaatctatcattattgatgccattggacagttaatcggtatgagagcttcttctgattacgtcagacatggtgaaaagaaagcaattatcgaaggtatctttgatatagacgagagtaaagacgcaattaatatactagaatcattagctatagatgttgatgaagattttttattagttaaaagagaaattttcagttctggtaagagtatttgtcgtattaataaccaaactgtcactctacaggacttaagaaaagtgatgcaagaactgcttgatattcatggtcaacatgaaacgcaatctttacttaagcaaaaatatcatcttcaactattagatgattatgcagacaatcagtattcagatttacttaatcaatatcaactttcttataaccaatataaaaataaacgtaaagaattagaggaattagaatccgcggaccaggctttattacaacgattagacttaatgaaatttcaattagaggaactaaccgaagcttcactgaaagaaggcgaagtggaccaacttgaatccgatattaaaagaattcaaaactccgaaaaattaaatctagctttaaacaatgcacatcaagttctaactgatgaaagtgcaatacccgataggttgtacgaattaagcaactacttgcaaacgattaatgatatcgttccagaaaaattcgtaagattaaaagaggacattgatcaattttactatatgctagaagatgcaaagcatgaaatttacgacgaaatggctaacactgaattcgatgagcaagttttaaatgagtatgaatccagaatgaatttacttaataatttaaaacgtaaatatggtaaggatattactgaacttattgcttatcagagtaaacttgcaaatgaaattgataaaatagaaaactatgaacaaagtacatcacaattaagggaagaaattaaaacgctttataacgaagtgatagatataggaaaaaaactttctcaagaacgtaggcgtgtagcgagagagttaagggaccatattgtttctgaaatacaaaatttacaaatgaaagatgctaaccttgaaatttcgtttaaaccattagatgaacctacaattgaaggtattgaatttgtggaatttttaattagtccaaatcgtggtgaaccacttaaaagtcttaataaaatcgcttcaggtggtgaactttcaagaattatgcttgctctaaaaagtatatttgttaaatcacgcggccaaaccgcgattctttttgatgaagttgactcgggtgtatctggtcaagcagcacaaaaaatggctgaaaaaatgcgagatattgctcaatatatacaagttatttgtatttcacacttacctcaggtagcttcaatgagtgaccatcatcttctaataagcaaggcatccaatgccgatagaactacaactcaagtcaaagaattgaaagatgaaaacaaaatagatgaaatagcacgtatgatttcaggagcaagtgtgactgagctcacgagagaaaatgcaaaagaaatgattaagcaaaatcacaatatttaa

SEQ ID NO: 7879 - DNA, 453 bp, Staphylococcus epidermidis; identical to SEQ ID NO: 5978

SEQ ID NO: 7880 - DNA, 783 bp, Staphylococcus epidermidis
atgaaatattcattaaatgctggtggtaaaagaatcagaccagtcatattattattaacactaaaaatgcttaacaaagattatcaacaaggactaaatagtgctttagcattggaaatgattcatacttattctttaattcatgatgatttaccagcaatggataatgacgattaccgtagaggaaaattaacaaatcataaagtttatggtgaatggaaagccattcttgctggtgatgcattattaacaaaagcttttgaattagtttctaatgatactaccattgaagatagtgtgaaagtaagtattataaaaagactttcaaaagcaagtggacattggggaatggtgggtggccaagcgcttgatatggaaagtgaagggaagtcaattcgtttagaaactttagaatcaattcatgaaactaagacaggcgctttactaaatttttcagttatggctgcggtagacattgctcaagtagaacaaaatattgctaagaatttagatgaatttagtcatcatttaggaatgatgtttcaaattaaagatgatttactggatgtgtatggtgatgaatcaaaacttggcaaaaaagtaggcagtgatatagtaaatcataaaagtacttatgtttctttacttggaaaagaaggagcagaagaaaagttaaacaatcatcaatatcttgctatgaactgcttaaatcaaatttctgatcaatatgatacttctgaattaagtgatattgtagatttattctataacagagaccattaa

SEQ ID NO: 7881 - DNA, 231 bp, Staphylococcus epidermidis; identical to SEQ ID NO: 3314

SEQ ID NO: 7882 - DNA, 1338 bp, Staphylococcus epidermidis; identical to SEQ ID NO: 3315

SEQ ID NO: 7883 - DNA, 390 bp, Staphylococcus epidermidis; identical to SEQ ID NO: 3316

SEQ ID NO: 7884 - DNA, 363 bp, Staphylococcus epidermidis; identical to SEQ ID NO: 3317

SEQ ID NO: 7885 - DNA, 1359 bp, Staphylococcus epidermidis
atgaaaaagattttaatcgctaatcgtggtgaaatcgcagtaagaataataagagcggcacacgatttaggtattcaaacagtagctatatactcagaaggtgacaaagatgcattacatactcaaattgctgatgaagcatactgcgtcggtcctactttatcaaaagattcttatttaaatataccaaatattttatctatcgctacttctacaggatgtgatggtgttcatcctggatacggctttttggctgaaaatggtgattttgctgaattgtgtgaagcatgccaattaaaatttattgggccaagctatcaatcaattcagaaaatgggaataaaagatattgctaaagctgaaatgattaaagccaatgtacctgtagtaccaggaagtgaaggacttattcaaagtatagatgacgctaaaaaaatagctaaaaaaatcggctatccagttatcatcaaagccacagcaggtggtggtggaaaaggtattcgggttgctcgtgatgagaaagaacttgaaactggttaccgtatgacacaacaagaagctgaaaccgcgttcggaaattgtggtttatacttagaaaaatttatagaaaactttagacatatagagattcaaattattggcgatacttatggaaacgttatacatttaggtgaacgtgattgtacaattcaaagaagaatgcaaaagctcgttgaagaagcaccctcaccagtactaagtgaagataaacgccaagaaatgggtaatgctgcaattagagctgcaaaagctgtaaattatgaaaacgcaggtacaattgaatttatatatgatttagatgataaccaattttatttcatggaaatgaatacacgtattcaagttgaacacccagtaactgaaatggtaacaggagtagatttagtaaaattacaactcaaagttgctatgggtgaggcgttaccttttaaacaagaagatatttccattaacggtcacgctattgaatttcgaatcaatgctgaaaatccttacaaaaactttatgccatcaccaggcaagattacccaatatcttgctccaggcggttttggagtgagaattgaatcagcatgttatactaattatacgataccaccttactatgactccatggtggcaaaacttatagttcacgaacctacacgtgaagaatcaattatgacaggcattcgtgctttaagtgaatatcttgttttaggtatcgacactacgattccattccacttaagacttctaaataatcatatttttagaagtggggaatttaatacaaaattcctagaaaagtataatattatggacgataataaccaatag

SEQ ID NO: 7886 - DNA, 468 bp, Staphylococcus epidermidis; identical to SEQ ID NO: 3319

SEQ ID NO: 7887 - DNA, 1131 bp, Staphylococcus epidermidis; identical to SEQ ID NO: 5986

SEQ ID NO: 7888 - DNA, 738 bp, Staphylococcus epidermidis
atgaaaaacatcatcgtaattaagctcggtggtatagctatagaaaatttaaacgacgcatttatacaacaaattaatgcttggcaccttgaaaacaaaaaaataattattgttcacggtggcggccaagtcatcagtaatttattaactaaaaacaatcattcaactattaaaattgatggcatgagagtaactgctaaaaatgatttacctatcatatatgatgctttaattaacatagttggccatcaacttttagaaagacttaaagaatctaatttagaattttttcaatttaaagaaaagataaaagaacttgtaagcgccgaatttttaaataaaaatatctatggttacgttggtaaagttaaagaaatcaacacgatgctattagaaaaaatgttatcacgcgacataataccaattatcactagtttgggtgtaaatgagcaaggggagtatcttaatgttaatgctgatcatctcgccaccgcaattgctaagaaactaaaagtcgaaaaattagtatatatgactgatgtccctggtgtaattgaaaaagataaaacgcttgctactcttacaattaatgaagcaaaaacaaaaattgaaaataaaataattacaggcggaatgatacctaaaattgagagtgcaatccaaacattagaatctggtgttgaatcgattttaattgcaaataatttacaaaaaggaacaatcataaggggtgattaa

SEQ ID NO: 7889 - DNA, 1194 bp, Staphylococcus epidermidis
atgaatataattaagggaaatattgcaagtcctcttggattttcagctgatggtctgcacgctggctttaaaaagaaaaaattagactttggttggattgtttcagaagtacctgcaaatgtagctggtgtatttacaactaataaggtcattgctgcaccattaaaattaacaaaaaacagcatcgaaaaaagtggtaaaatgcaagctattgttgttaattcaggtattgctaattcttgtactggtaaacaaggagaaaaagatgcttttaaaatgcaacaactggccgcaaataaattacaaattcaaccagaatatgttggtgtcgcatctactggtgttattggaaaggtgatgccaatgtctattctaaagaatggcttttccaaactagttaaaaacggtaatgctgatgactttgcaaaagcgatattaacaacggatactcatacaaaaacatgcgttgtaaacgaagaatttggtagcgatacagtaacgatggcaggtgtagcaaaagggtcaggaatgatacatcctaatttggctacaatgctagcatttataacctgtgacgctaacatctcatcacaaacattacaacaggctttaaaagatgtggttgaagttacattcaatcaaatcactgtagatggtgacacttcaacaaatgatatggtgcttgtgatgtcaaatggatgtacaaataataacgaaattaaaaaagacagcgaagactactataaatttaagcagatgcttctatatattatgaccgatttagcaaaaagtattgcaagggatggcgaaggtgcttctaaattaatagaagtcacggttaaaggtgcaaaagaatctagtgctgcaagaatgattgctaaaagtgtggtgggttcaagtttagtaaaaaccgcaatttttggcgaagatcctaattggggtagaattattgctgctgcaggttatgctaaaacatattttgatattaatcaggtagacatttttataggtaggatacctgtattaataagatcctcaccagtaaagtacgataaagaagaaattcaagaaataatgagtgctgaagaattatcaattcagcttgaccttcatcaagggaattgtgaaggtcaagcatggggatgtgatttatcgtatgactacgttaaaatcaacgcactatacaccacttag

SEQ ID NO: 7890 - DNA, 1026 bp, Staphylococcus epidermidis
atgcatatttctatagtaggtatcacaggctatacaggactagaattgttaagattagcacttaatcaccctcatgtaacagtttcatcgattcatgctacaaaagaagtgggagtgcaaatttctgatatattccctcatttgaaaggtatttttgataaagaaattcaggttttcgacagtgaatttattatgacacattcagatttggtattttttgctactccgagtggcgttgcaaaagatttatccaaaaatttcgttaaaaataattttcctgttatagacttatcaggtgaccatcgtttatctccagatgtttatctcaaatggtataaaaaatcaccgtgtactgttgatatacaaaagcgttttacatatggtctctcagaagtaatgaatattagtcatcgcaatagatttattgctaaccctggttgttatgcaactgcaactgaattagcgctatatcccttaatcagcaatcatttaatccgtgttgattctataattgttgatgctaaaagtggtcttactggagctggtaaaaaattaaatcagtcatcgcattacgtaaatgtaaacaataattatgtgacgtataaacttaataaacatcaacatattcctgaaattgtacaaacgttgcagttttttaacaaaagtttacagaatattcagttttcgacatcgcttattccggttaatagaggtattgttgcaactatatacacacggcttgaaaacggagttaaaataaatcaaatagaatctacctacaaggatgtatataaaaataagcctttcataagaattaaagatggattaccacagttaaatgaagtaataggaacaaattacactgatattggttttgtttataacgaaaccacgggtgttttaacaatttcatcagttattgataatttaattaaaggtgccgctggacaagcaattcaaaacatgaatctgatgtttaatttcgacgaaactgatggtttaattttggcgcctttatatatctaa

SEQ ID NO: 7891 - DNA, 558 bp, Staphylococcus epidermidis
atgatttcagtaaatgattttaaaacaggtttaacgatttctgttgataacggaatctggaaagttattgatttccaacatgtcaaaccaggaaaaggttcagcttttgttcgttctaaattacgtaatttaagaacaggtgctattcaagaaaaaactttcagagctggcgaaaaagttgagcaagcaatgatcgagaatcgtcgtatgcaatatttatatgctgatggcgataaccatgtattcatggataacgagacatttgatcaaatcgaattacctggtgactacttaaaagatgaattaaattacttaaaagcgaatatggaagttcaagttcaatcttatgaaagtgaagttattggtgttgaattaccaaaaactgtagaacttgaagttactgaaactgaacctggaatcaaaggtgatactgccactggcgcaacaaaatctgcgactgttgaaacaggttatactctaaatgtacctttgtttgtaaatgaaggtgacacactagtgataaatactagtgatggaagttacatttctagaggataa

SEQ ID NO: 7892 - DNA, 1062 bp, Staphylococcus epidermidis; identical to SEQ ID NO: 3325

SEQ ID NO: 7893 - DNA, 579 bp, Staphylococcus epidermidis
atgaaaaagttaatattaatagttggtgcgagcagtttgcttatgggttgtggaagtcagaacttagctcctttagaagataaaacgactgagttacgtgatgataatcatcaattaaaacttgatattcaagaacttaatcaagaaattggcgaacataaatctaaaatagccgcccttaaacaagataaagaaaatactaaagaggcttcatctaataagttaaaaataaaaaatttaaaagcatcatctgattattacgactctattgcaaaaaccattaaagattatagagatattgaatcaaaagttaataaaaataataataaagtagcgattcaaagaaaattagatgacattttaaatgatattgacggtactttcattaaatataaagaatctgtagactctgaatcacaatctgaagaagataagaaaaaagaaaaagaaatacgtcaacttaataaagacttatcttcagcattcaatacaataaaaaaaggatatgaaacgaaagataataaaaaaatagaaaaaggtcaaaaaaaacttgcaacaataaatacaaatttaaattaa

SEQ ID NO: 7894 - DNA, 219 bp, Staphylococcus epidermidis; identical to SEQ ID NO: 3327

SEQ ID NO: 7895 - DNA, 831 bp, Staphylococcus epidermidis; identical to SEQ ID NO: 3328

SEQ ID NO: 7896 - DNA, 387 bp, Staphylococcus epidermidis; identical to SEQ ID NO: 3329

SEQ ID NO: 7897 - DNA, 141 bp, Staphylococcus epidermidis; identical to SEQ ID NO: 3330

SEQ ID NO: 7898 - DNA, 1509 bp, Staphylococcus epidermidis
atgattagtaaatcaagtcctttaatatttgaaagatccaaaaaagatagatatgcgtattcattaccacaaaatgacattgagaatatcagtattgcttcactcttagatgataagtatattcgtaaacataaggctgaatttcccgaggtttcagaattagatttagttagacattataccgaactatcaaataaaaatttcggggtagatactggattttacccattaggttcttgtacgatgaaatataatcctaaaatcaatgaaaaggtagcccgtatttctggttttagtgaatctcatcctttacaagaagaagaacacgttcaaggttctcttgaaattatatatagtttacaagaagaattgaaggaaattactggtatggatgaagttaccctacaacctgctgcaggtgcacatggtgagtggactgctttaatgattttcaaagcttatcatgaaaaaaatggacaaagccatcgtgatgaagtaatagtgcctgattcagcacatggtactaatcctgcttctgcctcatttgctggatttaaatcagtaactgtaaaatctaatcaatgtggggaagttgacatagaagatttaaaaagagtagtaaacgataatacagctgcaatcatgttaactaatccaaatacattaggtatatttgaacagaatattattgaaatagggaaaatcgttcatgaagcaggaggtttattatattacgatggagcaaatttaaatgctattttagataaagtacgtcctggtgatatgggctttgatgcggtacatcttaatttgcacaaaacattcactggtcctcatggcggtggtggaccaggatcaggaccagttggagtagtagagaaattagccagttatctacctaagcctatggttataaaagataacgataggtataaatatgataatgatattccaaattcaattggacgagtaaaaccgttttatggaaatttcggcatttatttaagagcatatacttatatcagatcaatgggagccaatggtttaaaagaagtatctgaagctgccgttcttaatgcgaattatataaaatctcgccttaaaaatcactttgaaattccgttcaatcaatattgtaaacatgaatttgtattaagtggaactttacaaaaacaatatggtgtcagaacattagatatggctaagcgactgttagattttggtgtgcatccacctacaatatattttcctctcaatgtcgaagaaggaatgatgattgagccaacagaaactgaatctaaagaaacacttgattactttattgatgcgatgattcaaatcgctgacgaaacaaaaaatgatccagataaagttttagaagcaccacatacgactataattgatcgattagatgagaccactgcagcacgaaaaccaattcttaaatttgaagaacttaaggacgaaaagtataaagaacacacaaatattgattctgaagataattaa

SEQ ID NO: 7899 - DNA, 1347 bp, Staphylococcus epidermidis
ttgagtcatcgttatataccattaacagaacaagataaaaatgaaatgctaaatagtattggggcaaaatctatttccgaattatttgatgatatacctacagatattttattaaaaagaaatttaaatattgccgaaagggaagcggagacgatattacttagaaggttaaatcgtctcgcagctaaaaatacaactaaagaaacacatgcaacatttctaggtgcgggcgtttatgatcattatactccagctgttgtcgatgcaatgatttcaagatctgaattctacaccgcatatacaccttatcaacctgaaatttctcaaggtgagttacaagcaatttttgaatttcaaacactcatttgtgaattaacagatatggatgtagcaaattcttctatgtatgatggtatgactagttttgctgaagcatgtatattggcactaagtcatacgaaaaaaaataaaattgtagtttcaagtggactacattatcaagctttacaaattctacacacatacgccaaaactcgtgatgaatttgaaataattgaagttgaccttaaaggtactattactgatttagagaaattagaacaacttatcgatgacaacacagcagctgtcgctgtccaatatcccaatttttatggttctattgaagatttagaacaaattaataactatataaaggataaaaaagctttatttatcgtatatgccaatccactttctttaggattactaacacccccaggtacattcggggcagacatagtagtgggagatacacagccttttggtattcctacacaatttgggggtccgcattgtggatactttgctacaacaaagaaattaatgagaaaagtacctggtcgattagttgggcaaactcaagatgacgaaggtaatcgtggatttgttctcacgttacaagctagagaacaacatatccgccgtgataaagcaacttctaatatttgttcaaatcaagctttaaatgcacttgcatcttcaatagcaatgtcagctttaggtaaacaaggtatttatgaaattgcagttcaaaatcttaaaaatgccaattatgccaaaaataagtttgaagaacatggttttgaggtactaaaagcacaatcttttaatgaatttgtagtcaaatttaatcaaccaataaaaaatattaatcttaaattagcagaatatggatatattggtggttttgacttaggtgaagtatctgatgattttaaaaaccatatgttagtagcagttacagagttaagatctaaagatgaaatcgatgatttcgttacgaaagcaggtgagttaaatgattag

SEQ ID NO: 7900 - DNA, 1092 bp, Staphylococcus epidermidis
atgacaacagatttgaaaaaaacacctttatatcaaaattacgttgatagtggtgctaaaattgttgagttcggaggatgggcaatgcctgttcaattctcaagtatcaaagaagaacataatgcagttagatataatgttggtctttttgatgtaagtcatatgggagagatagaaattagtggtaaagatgcagaacaattcatacaatacatcctttctaatgatacaaatcttctaacaaatgataaagcaatgtatagtgcgttatgtaatgatgaggggggcatcattgatgatttagttacatataaacttaatgaaaaccactacttgcttattgtaaatgcagccaataccaataaagattatcaatggattaagaaacatagctctaattttactgtagatgtgagcaatacttcagacaaatacggccaattagctattcaaggtcctcattcaagagcattaataaatgaattagtggatatagatgtaagccatatggcaatgtttgaattcaaacagaacgtacaaatctttggtaaatctattattctttcgcagtctggttatactggagaagatggctttgaaatttactgtaagcaagaagatactaaggatatatgggagcaattattagaatacgatgttacaccatgcggtttaggtgctcgtgatacgctaagacttgaagcaggattacctttacatggtcaagatttatctgaatcaattactccttatgaaggagggatagccttcgctgctaaaccgttaattgaaaatcattttattggcaaatccgtactcaaagctcaaaaagaaaatggttccgagcgtagaacagtaggtcttgaactattaggtaaaggcattgctagaacaggttatgacgtactagatgaaaatagtaatgaaattggtttcgttacatcaggaacacaatccccatcttctggtaaatctatagcacttgcaataatagatagagatgcatttgaaatgggcaaaaaagtaattgtgcaaatacgtaagcgtcaagttgaggcaaaaatagttaaaaaaaatcaaattgagaaataa

SEQ ID NO: 7901 - DNA, 513 bp, Staphylococcus epidermidis; identical to SEQ ID NO: 3334

SEQ ID NO: 7902 - DNA, 492 bp, Staphylococcus epidermidis
atgaaatacaattattcaataataaaatatgtggggaggataaagcatttaatacgcgaacatgtatttcaatttaatataaaagcatttacttacatcgaagcattatttgctttatttgtgactactttaattctcgctttattacctactatacttaaattgacttcgttttatcttaatactgctcaaaataacgaagatattcaatttgaattttttagaagagatttacttaaagagaaaatgacgactcaaaacaattatgagatagaaaatgcatatacaattaaacttaagaaagataaagatgttattagatatatttataaaaaccgtaaaatttacaaaaacattaatcaaaaaggtaatattacattgttaaatcacgtcttgtctactcgtatattaaaaacgaacgataatatagtaaaattattaataacaacaggagaaacgaacgatgaacacaaagaaatcctgtttatatag

SEQ ID NO: 7903 - DNA, 294 bp, Staphylococcus epidermidis; identical to SEQ ID NO: 6002

SEQ ID NO: 7904 - DNA, 438 bp, Staphylococcus epidermidis; identical to SEQ ID NO: 3337

SEQ ID NO: 7905 - DNA, 318 bp, Staphylococcus epidermidis; identical to SEQ ID NO: 6004

SEQ ID NO: 7906 - DNA, 1068 bp, Staphylococcus epidermidis
gtgaagaagttgtcgataaatacatttaaatataagaggaataaatatcttactgaaatacaatcaatagacttactacagagattacaacagcttttaagtcacggattcactttatatcaaagttttaaatttttaaactcctattttaaatataaagagcgaacaataaataaaaagattatccaacatctacaaaacggtgctacatgttatgatattttaaaaataatagggtatccagaattagttcttcttcaaataaaatttgctgaaaactacggcaacattgaggaggctctcgttgatactgttcaatatatgaaaagaaatctgaaagctaaaaaacgactcatcaaaaccttacaatatcctgttgcattaatttctatcttcttattcatattaaccattttaaatataactgtcatacctcaatttcaacaactttatgagactatgaatgttaaattatcaacatttcaaaatctactaactcttattattacccgtcttcccaaactaactttcatttttatctttattagtggtatagcattttttatcacttataaattctactattatctaccaattgagaaaaagttaaaatctattttaaaaatcccaatgattaatacgtattataaaatatatagaacttatcaactttccaatcaactttctttattttacagaaatggtacaagtcttcaacaaattgtccgtatatatcgtaatgagcaagataacgattttcttaaatttctgggtgattatctttttaaagaagctaataaagggctcccgttacctgttatattaatgaatttaaaatgttttcaaaatgatttgattaaattcatagaacaaggagagaaaaatgggaaattagatatagaattaaagttatacagtcaaatgctattacagcaatttgaagaaaaagtgttaaaacaaacaaaatttatacaacctatcatcttctttatcttgggaatttttattgtatctttatacttagtcattatgcttcctatgtttgaacttatgcaaacaataaaataa

SEQ ID NO: 7907 - DNA, 975 bp, Staphylococcus epidermidis
ttgaaaattttatttgaacagattatcaatcatgcaattaagcaagaagcaagtgacatacactttataccatgtgaggaacacactataattaagctaagaattaaagatgagctcacaatatatgatagactttcatttccaatttataaaaaattacttatatacatgaagtttcaatctggcttagatgtatcaacacagcatagagcacaaagtggtagatatagttataagatgaagcatttatattatttaagaatctctacattacctttatcattaggcaatgaaagttgtgtaattcgtatagtacctcaatacttccaaactacacgagaatcatatgaatttaaagattttaaacactttatgaaaaagaaacaaggtctacttttgtttagtggaccaactggctctggcaaaagtactttaatgtaccaaatggtcctttatgcacatcaaaaattgaatttaaatgtaatatcagttgaagatccagttgagcaaatacttaatggaatcacacaaatatcagtcaatgaaaaggcaggtataaattatgaaagctctttcaaagccattttaaggtgtgatccagatgtaattttaattggtgaaatcagagattctaccgtagctaaatacgtgattcaagccagtttaagcgggcatttagttttgtcgacaatgcacgcgaatgattgcaagggagcactattacgattattagaaatgggtatttctgtccaagagttgtgccaggcaatcaatttaatttctaatcaaagattaatcactactactacaaattatcgtcaactagtatcggaattaatgtttcaaagccaaataaattatttttttgaacataatcattctttacctaaaaatttcacaaaattagctacacatttaaacaaaatgtctaaagaaggtgttatatgtgaagaagttgtcgataaatacatttaa

SEQ ID NO: 7908 - DNA, 624 bp, Staphylococcus epidermidis
atgcgaatttcaaatttaacattaggaatagttgatactaatacgtatttcattgagaatgaagaaaatgtaatattaatcgatccctcaagtgaaagtcaaaaaataataaaaaaattaaatcaaatcaataaacctttaaaagcaattttattaacacatgcacactatgatcatatcggagcattagataatattattgaaaaatatcaggttccagtttatatgagtaaagatgagtttgattttttaactgatccagataaaaatggctcatctaaatttacacaatatggtttatctaaaatagaaagtcacgcaaatcccttaagtttatcagaaggtcctgcagagattgaaggatttaaatttaaagtattacatacgccaggtcattcgccaggtagtcttagttttgtttttaatgactttgctgttgttggcgatactctgttcaaaaatggtatcggtcgtacagacctttataagggagattatgaaacattaattgattcaataaaagataaattatttgaattagagggtgatatgccacttttccctggacatgggccttacactacagttgacgatgagcaactcaatccgtttataaatggttaa

SEQ ID NO: 7909 - DNA, 327 bp, Staphylococcus epidermidis; identical to SEQ ID NO: 3342

SEQ ID NO: 7910 - DNA, 987 bp, Staphylococcus epidermidis
atgacagatattattttagctgctgatataggcggaacaacttgtaaattggggatatttgacaaggatttagaacaattgcataaatggtctattgatactgatacaagtgaccacactggtgagttacttttaaaaaacatttataattcttttactgaaaagattgcagaatataaatatgattttaacaatgtagttggagtcggtattggtgttcctgggcctgttgattttgatactggagttgtatacggagctgttaatttacattggcccgatagtgtcaatgtaagagaaattttcaaacaatatgttaattgtccagtttatgttgataatgatgctaatgttgctgctttgggagaaaaacataaaggtgccggcgaaggtgctgatgatgtagtagccattactttaggtaccggcctaggtggaggtataatttctaatggagaaattgtacatggacacaatgggtctggcgctgagattggacatttaagagctgattttgatcaacgttttcaatgcaattgtggtaaatcaggttgtatagaaacagttgcttctgctactggtgtagtaaatttagttaatttctattatcctaaattaacgtttaaatcatcaattttacaacttattaaagataaccaagtaactgcaaaagctgtatttgatgcggctaaagctggcgatcaattctgtatatttataactgaaaaagtggcaaattatatcggttatttatgcagtatcattagcgttactagtaatccaaaatatattgttctaggagggggcatgtctacagcgggacttatccttatagaaaatattaaaactgaataccgtaatttaacttttactccagctcaaaataatactgagatagtacaagctaagttagggaatgacgctggtattactggtgcagctgggcttatcaaaacatatatcatagataaagagggtgctaaataa

SEQ ID NO: 7911 - DNA, 201 bp, Staphylococcus epidermidis; identical to SEQ ID NO: 3344

SEQ ID NO: 7912 - DNA, 1461 bp, Staphylococcus epidermidis; identical to SEQ ID NO: 3345

SEQ ID NO: 7913 - DNA, 552 bp, Staphylococcus epidermidis; identical to SEQ ID NO: 3346

SEQ ID NO: 7914 - DNA, 150 bp, Staphylococcus epidermidis
atgcgcgtaaacgttacattagcttgtacagaatgtggagatagaaactatatctcaacaaaaaacaaaagaaataatcctgaacgtgttgaaatgaaaaaatattgttcacgtgataacaaacatactttacatcgtgaaactaaataa

SEQ ID NO: 7915 - DNA, 2040 bp, Staphylococcus epidermidis
atgaataaaagaatcaatttcatatttggatttatagtatttatctttgctatagtcgtattgagattaggttatttacaaatagcacaaggatctcattacaaacaattaatcaaaaacgatgaaaacataactgttaatgaatcagtaccaagaggccgaatactagatagaaatggcaaagtactagttgataatgcttcaaagatgtctattacatacactagaaaccgtaaaacatcacaaaaggaaatgttaaatactgctaagaaactgacagatttaattaaaatggatacagataaaattactgagagagataaaaaggatttttggattcaaatgtatccgtcatctgctaaaaagttaatgagaaaagaacaattaatgttagaggatggcagtatttcacaagaccaatttgatacccaacttagagataaaataggaaaaaaacaattaaaacagttaactaaaaaagatttgcaagttttagcaatttatcgggaaatgaacgctgggtcaactctagatcctcaaacaattaaaaatgaagacgtaagcgagaaagaatatgcagccgtatcacaacagctttctaaattacctggtgtaaatactacaatggattgggatagaaaatacccatacggtgatactttaagaggcatatttggagatgtgtcgacttcgactgaaggtatacctaaagaattaactgaacaatatttatcaaaaggttattcacgaaatgatcgggtcggtaaatcttatcttgaatatcaatacgaagatgttcttaaaggcacgaagaaacaaatgaaatatacaactgataaatctggaagagtaataagttcagaagtacttaatcctggctcaagaggtcatgatttacaattaactatagatattgatttacagaaaaaagtagaatctttattagaaaaacaaatttctaaattacgtagtcaaggtgctaaggatatggacaatgcgttaatggttgtccaaaatcctaaaaatggagacattctcgctattgcaggaaagcaaattgataagcaaggtaaactcaaagattatgatatcggcaactttacagctcaatacacagtaggttcttcagtaaaaggaggaacattattagctggataccaaaataaagctattaatgttggagaaactatggtagatgagccattaaaattccaaggtggtttaactaagcgttcttattttaataaaaatggtcatgtatctatcgatgataaacaagcacttatgcattcatcaaacgtatacatgtttaaaaccgcacttaaattagcaggtgacccctatacttcaggtatgtcattacctaataatatagcagatgctggtcgtaaattgcgtaaagggttaaatcaagtaggtcttggcttaaaaacaggtattgacttaccgaacgaaacgccaggccaaatagaacccttaactaataatcctggtaactatttagacttagctattggacaatacgacacatatacaccacttcagttgtcccaatacgtatcaactattgctaatgatggctatagaattcaaccacatattggattgtctatttatgaatctactaataaagatgaaactggtccattaaaacgtaaaattaagggtaatgttttaaataaggtaaataactcaaatgacgaaattaaagaagttcaagaaggcttcaaaatggctttcaatgaaaagcaaggtacaggttatgctagttttagaaatactgtagtaccttcagctggtaaaacaggaactgctgaagtttttcaagacggagaacctagagttaactcaacatatatcggttatgcacccgtcgatgatcctaaattatctttttcaattgtctatacaaatcaacctgttccaccaccttggttaaatggtggagatttaggtagagacgtaatcaactactattttaaagataaggataataaaaaagatgactctcaatctaataacgaagagaaagaagattaa

SEQ ID NO: 7916 - DNA, 600 bp, Staphylococcus epidermidis
atggcttttgaattaccaaatttaccttatgcatatgatgcattagaaccacacatcgacaaacaaactatggaaattcatcatgacaaacatcataacacatatgttacaaaattaaattcagcagttgaagggacagatttagaagctaaatcaatcgaagaaattgttgctaatttagatagtgtgccatctaatattcaaacagctgttcgtaataatggcggtggtcaccttaaccattcattgttctgggaactattatcaccaaattctgaagaaaaaggtgaagtagtagataaaattaaagaacaatggggttctttagatgaatttaaaaaagaatttgcagataaagctgcagcacgctttggttcaggatgggcttggttagttgtaaacaatggacaattagaaattgttacaacaccaaatcaagataatccaattactgaaggaaaaacaccaattttaggtttagatgtttgggagcatgcttattatcttaaatatcaaaataaacgcccagattatatcaatgcattctggaatgttgttaactgggaaaaagttaatgaattatataatgcaactaaataa

SEQ ID NO: 7917 - DNA, 420 bp, Staphylococcus epidermidis; identical to SEQ ID NO: 3350

SEQ ID NO: 7918 - DNA, 849 bp, Staphylococcus epidermidis
ttgatagatgcgttattaaattttgattttattagatattctttgattagcggtctgcttattggctttatcgcaccattaataggtgcatttattgtagttcggagactatctttaattgctgacgctttaagccacgtgacattaggtggtatttcctttggtatgtttttgcttaccattattccagttttctcagtaataaaccctatgtggtttggtattctttttgctgttattggagcgttattaattgaaaaattaaggacttcgttttctaattatcaagaaattgcaattcctattataatgagcgctggtattgctctaagtgctatttttatttctctagcagatggttttaatcaagaaatcgtaggcctactatttggatcaattagtgcagtaaatattagtgatttaactacaattattatcattacaataattgttctcatatttattgttttattttataaagaattgtttattttatcatttgacgaagaatatagtaaggtcataggtataccaaagtggattcaatttttatttatagtaattgttgctatggtaatatctgcatcaatgagagttgtaggtatattattagtaagcgcgttaataactcttcctatagcaatttcaatgagaataactaaaggatttaaacaattaatagcattaagtgttatattaggagaattatctgtaattctaggattaattatagctttttatatgaatatatcacctggtggcgtcattgttgtactattggtattaatgctcatactaacgatgattattcagaagttaaaaattaagtttaaaaagggagtcgtttaa

SEQ ID NO: 7919 - DNA, 783 bp, Staphylococcus epidermidis; identical to SEQ ID NO: 3352

SEQ ID NO: 7920 - DNA, 891 bp, Staphylococcus epidermidis
atgttaataggatcacatgtttcaatgagtggcaaaaaaatgctgcaagggtcagcagaagaagcacataaatatggtgaatctacatttatgatttatacaggtgcgcctcaaaatacaagacgtaaaaatattgaagatttaaatatcgaaaaaggccagcaggcaatgaaaacatatggcttatcaaatatcgttgtacatgcaccatatatcattaacattgcaaatacaaccaaacctgaagtatttaatttaggagtcgactttctacaaaaagaaatcgaaagaactcaagcgctcggagcgaaagatattgtactgcatcctggagcgcatgtcggagcaggtgtagataaaggaattcaaaaaattattgaaggacttaatgaagtactcacacatgataatgatgtaagaatagcacttgaaactatggcgggtaaaggaacagaagtagggagatcttttgaagaaattgctcaaataattgatggtgttacacataatgatcgcttatcagtatgttttgatacgtgccacactcatgatgccggttataacgtcaaagaagatttcgatggtgtactagaaaaattcgacagcataattggagtagatcgaattaaagtagtacatgttaatgacagtaaaaacctaagaggtgcacagaaggatcgtcacgaaaatatcggctttggtcatattggctttgatgcacttaattacgtagtacatcatgatacttttaaaaatattcccaaaatattagaaactccatatgttggtgaagataaaaaaaataaaaaaccaccgtataaattagaaatagacatgttaaaatcacaaaaatttgatccagaactcaaaaacaaaattttaactcaataa

SEQ ID NO: 7921 - DNA, 1347 bp, Staphylococcus epidermidis
atgtcaaaacatccatttgaacactttaatttagatgagaatttaattgaagctgttaaaaatctcaattttgaaaaaccgactgaaatccaaaatagaatcataccgagaattcttaaaggaacaaatttaataggacaatctcaaactggaactggaaagtcacacgcttttcttttaccattaattcaacttatagaaagtgacattcaagagccacaagccatcgtagtagctccaacacgtgaacttgctcagcaactatatcaagttgctatgcatttagtaaaattcaaaaaaggtataaatgtaaaacttttcattggtggtaccgatttagaaaaagataaacaacgatgtagccatcaaccacaactcattattggtacaccaacaagaattaatgatttagcacattcaggttatcttcatgcacatttagcgtcatatttaattatagatgaagctgatttaatgattgacctcggtctcattgaagatgttgaccatattgcagcgagattagatgatgaaaatgctcatctagcggtatttagtgcaacaatacctaaatcattacaaccatttttaaataaatatttaagtcaaccagaatttgtagaagttgatggcaaagctcataataaagaaaatatcgaattttatctaattcctacaaaaggttctgctaaggtagataaaacattggaattgatagatatattgaatccttatctatgtattattttctgtaacagtcgtgaaaatgccgatgaattggcagacactttaaataaagaaggaattaaaataggtatgattcatggtggtttaacaccaagagaacgtaaacaacaaatgaaaagaataagaaatttagattttcaatttgtcattgcaagcgatcttgcttctagaggaatagatattgaaggcgtaagtcatgttattaatttcgatgtacccaatgatatcgatttcttcacacatcgcgtaggtcgaacaggaagaggtaattataaaggtgtagccattacattatatagtcctgatgaagaaagtaatattactcttattgaagacagaggttataaatttgaaaatgtagatattaagaatggtgaattaaaaccgataaaggcatacaatatgcgtaaatcaagacagcgcaaagatgaccatttaacaaatgaagttaaacacaaagtaagaagtaaatcaaaacgtaaagttaaaccaggctataaaaagaagtttaaacaagaagttgaaaaaatgaaacgtcaagaaagaaagcagtatagtaaaaagcaaaatagacaaaaacgaaaaaataataaaggatag

SEQ ID NO: 7922 - DNA, 1101 bp, Staphylococcus epidermidis
atgaaaattagtgaactgatggaagttttaaataatcacgttccatttcatcaagctgaatcatgggataatgtaggattattaattggtaatgataagttagatattacaggtattctgacaacactcgactgcaccgatgatgttgttaaccaagcaattgaacttaataccaataccatcattgctcatcatccacttattttcaaaggagtaaaacgtatcgttgaagatggatatggtagtataattcgtaaacttatccaaaataatatcaatcttatagcattacacactaatcttgatgtaaatcctaaaggtgtcaatcgaatgttagcggatcaaataggtttagagaacatatcaatgattaatacaaatagctcatattattacaaagttcaaacttttatacctaaaaattatattgaagatttcaaagacagtttaaacgaacttggattagctaaagaaggtaattacgaatattgtttctttgaaagtgaaggtaaagggcaatttaaaccagtaggtgatgcaagtccttatatagggaagttagatagtatcgaatatgttgatgaaataaaacttgagtttatgataaaagacaatgaattagaaataactaaacgtgctattttagataatcacccatacgaaacaccagtttttgattttattaaaatgaacaaagaaagtgagtatggattagggattattggacaattaaaccaaactatgactttagatgaattttctgaatatgccaaaaaacagctcaatataccgagcgtacgatatacaggtcaacatgatagtccaattaagaaagtagctatcataggtggttcaggtataggatttgagtataaagctagccaacttggagcagatgtttttgttactggtgatattaaacaccatgatgctttagatgctaaaatccaaaatgtaaatttattagacatcaatcattatagtgagtatgttatgaaagaaggattaaaagaattattagaaaaatggttatttaaatatgaaaatcaatttccaatatatgcttctgaaatcaacacagatccatttaaatataaataa

SEQ ID NO: 7923 - DNA, 690 bp, Staphylococcus epidermidis; identical to SEQ ID NO: 3356

SEQ ID NO: 7924 - DNA, 1107 bp, Staphylococcus epidermidis
atgtctgacaaccaagttaaaattaaaaagcaaacaattgatccgactttaacactagaagatgttaaaaaacaattaattgataaaggaaaaaaagaaggtcatttaagtcacgaagaaatcgctgaaaaactgcaaaattttgaaatggactcagatcaaatggatgatttcttcgaccaattgaatgacaatgacattacacttgttaatgaaaaagatagttctgacacggatgataaaatcaatcctaatgatttgagtgcccctcctggtgtcaaaatcaatgacccagtgcgtatgtatttaaaggaaattggtagagttaatcttttaagtgctcaagaagaaattgagcttgcaaaaagaattgaacaaggtgatgaaattgctaaatcacgattagctgaagcaaacttgcgtttagttgttagtattgctaaacgatatgttggtcgtggaatgttattcttagatttgattcaagaaggtaatatgggcttaattaaagctgtggaaaagtttgattttagcaaaggatttaaattttcaacatatgccacttggtggattagacaagctattacacgagcaattgctgaccaagcacgtacaattcgaataccagtacacatggtagaaacgattaataaattgattcgtgttcaacgtcaattattgcaagatttaggaagagatccagctcctgaagaaattggagaagaaatggatttaccaccagaaaaagtcagagagattttaaaaattgcacaagaacccgtttcattagagacgccaattggtgaagaagatgatagtcatttaggagatttcattgaggaccaagaagctcaaagtccatctgaccatgcagcatacgaattgttaaaagaacaattagaagatgttttagatacacttactgacagagaagaaaatgttttacgtttacgttttggtttagatgatggacgaacaagaacactagaagaagttggaaaagtattcggtgtaacacgtgaaagaattcgtcagattgaagcaaaagctttaagaaaactaagacatcctagtcgaagtaaacgtcttaaagatttcatggattaa

SEQ ID NO: 7925 - DNA, 1797 bp, Staphylococcus epidermidis; identical to SEQ ID NO: 3358

SEQ ID NO: 7926 - DNA, 819 bp, Staphylococcus epidermidis; identical to SEQ ID NO: 3359

SEQ ID NO: 7927 - DNA, 492 bp, Staphylococcus epidermidis; identical to SEQ ID NO: 3360

SEQ ID NO: 7928 - DNA, 1392 bp, Staphylococcus epidermidis; identical to SEQ ID NO: 3361

SEQ ID NO: 7929 - DNA, 756 bp, Staphylococcus epidermidis
atgaaacaaaagggcatcattatcaaatctgttgattatggtgaatcagacaaaatcattacaattttaaatgaatacggagctaaaataccactaatggccagacgagcaaaaaaagttaagtctggacttcaagcaaatacacagcttttcgtatatggcttatttatatataataaatggcgaggcatgggaacactaaattctgttgatgtgattaatcaacattatgaactccaactcgacttatttgaaagtagctatgcatctttatgtgctgaaacaattgaccgatcaatggaagagaatgaggtttcaaaatataattatgacttacttcaatttgttctttccaaaattaacgaaggaacccctgcacaattaatgtctgtaatcgtcttattaaaaaatatgtctaaatttggattcacagcttcatttgatcactgtgcaattaccggcattcaagatcaatcaaaacttatagcgtatagttttaaatttgacggtgctatttcagaatctgcattatatcaggatcaacatgcttttcatctctctaatcgcaccttatatcttcttaatatcctgcagcaattacctataagtaagatgaatcatttaaatattcagcaagacatattaaatgaaatgtctgaactacttatcatgctttatcgtgagtatgctggtatgttttttaaaagtcaaaaattaataaatcaattaaatagattagaaaaagattcattgtaa

SEQ ID NO: 7930 - DNA, 900 bp, Staphylococcus epidermidis
atgacagaacataaatcaggatttgtttcaattatcggtagacctaatgtaggtaaatctacctttgtaaacagagtaataggacataaaattgctattatgtcagataaagctcagacgactagaaataaaatacaaggtgtgatgacaagagatgatgctcaaatcatctttatcgatacacctggtatccataagcctaaacataaattgggagattacatgatgagagtagctaaaaacacactttctgaaattgatgctattatgtttatggttaatgtaaatgaagatataggtagaggagacgagtatataatggaaatgctaaaaaacgtcaaaacacctatatttttagttttaaataaaattgatttggttcatccagatacattgatgccaaaaattgaacaatatcagtcatatatggattttacagacataattccaatttctgctttagaagggttgaatgttgatcattttattgatgtattaaaatcttttttaccagaagggcctaaatattatcctgacaatcaaatttcagaccatcctgagcaatttgtggtgagtgaaatcattagagaaaaaattctacatttgactagtgaagaaattccacatgcaattggtgtcaatgtcgatcgtatgattaaagaggatgaagatagagtacgtattgaggcgacaatttatgttgaaagagattcacaaaaaggtatagtaataggtaaaggtggtaaaaagcttaaagaagtgggtaaacgtgcacgtagagatatcgagatgttacttggctcgaaagtttatcttgaattatgggtgaaagtacaacgtgattggagaaataaggtcaattttataagacaaattggatatgttgaagatcaagattaa

SEQ ID NO: 7931 - DNA, 405 bp, Staphylococcus epidermidis
atgagttatcaatcacactactttaaagaagtccgagaggcacaaaaaaatgcttacgcaccatacagtaactttaaagttggtgcttatttaaagacgaaagatggtcgatgtttttatggagcaaatgttgagaacgctgcatacccgatgggaatatgtgcagaaagatcaagtttagtaagcgctatatcagaaggttatcaaccaggtgattttgaatccattacagttactgtcgatgctgataaaccatcatccccatgtggcgcatgtcgccaggtgatgatggaactttgtgataaagatatgcctgtatatatgaccaatcaaaacggagatatgatagaagctacagttgatgaattattaccattaggattttctggaaaggatttaaattaa

SEQ ID NO: 7932 - DNA, 357 bp, Staphylococcus epidermidis
atgaaacgttttaaatatgcatatgagggtttttgcgcaattttaaaaaaagaccaaaatttcttattacacattttagcggccataattattatcatattaggatttgtgttaaatattgatcgtatagattggatattaatcatcgtagctataggacttgttttaagttttgaagctattaatacctcaattgaatttgttgttgacctaattacaactgactatcatgaatatgcaaaatacgctaaagatatagctgcgtttagtgttgtcatcgtttcaatcgtttcaatatgtattgggttaatcgtttttttaccatatatattagatatatttaagggaggaatgtaa

SEQ ID NO: 7933 - DNA, 468 bp, Staphylococcus epidermidis; identical to SEQ ID NO: 6032

SEQ ID NO: 7934 - DNA, 948 bp, Staphylococcus epidermidis; identical to SEQ ID NO: 6033

SEQ ID NO: 7935 - DNA, 684 bp, Staphylococcus epidermidis; identical to SEQ ID NO: 3368

SEQ ID NO: 7936 - DNA, 990 bp, Staphylococcus epidermidis; identical to SEQ ID NO: 3369

SEQ ID NO: 7937 - DNA, 711 bp, Staphylococcus epidermidis; identical to SEQ ID NO: 3370

SEQ ID NO: 7938 - DNA, 177 bp, Staphylococcus epidermidis; identical to SEQ ID NO: 3371

SEQ ID NO: 7939 - DNA, 1347 bp, Staphylococcus epidermidis
atgtcaacagttgcgtttcacacattaggttgtaaagtaaaccattacgaaactgaagcaatttggcaattatttaaagatgcaaattatgaaagagtagaatttgaaacaaatgctgatgtatttgttattaatacatgtacggtgacaaatacaggggataaaaaaagtcgtcagataataagaagagctattagacaaaatcctgatgcagtcgtttgtgtaactgggtgttacgcacaaacatcatctgccgaaattatggaaatccctggtgttgacatcgttgtaggtactcaagaccgacataaattattagattatatacaacaatttcaggacgagagacaaccttttaatggtgtaggcaatatcatgaaaaatagaacttatgaagaattagaagttccttactttactgatagaacacgtgcttcattaaaaatacaggaaggctgcaataatttttgcacgttctgtattatcccgtgggcacgtggattgatgcgttctagagatccagaaaaagtagtagaacaagctactcaacttgttaactctggttataaggagattgtattaacaggtattcacactggtggttatgggcaagaccttaaaaattataatctagcacaattgctaagagatttagatactattgaagggcttgaacgtatacgtatttcttctattgaagcaagtcaacttactgatgaagttattgatgtcattggaaactcaaataaggtggtacgtcatttacatataccgctacaatctgggtctgatgatgtgttaaaacgtatgagacgtaaatataccatggcacacttttcagaaagattgacaaaattacatcaagcattacctgatttagcagttactagtgatgtaatcgttggtttccctggagaatctgaagatgaattccaagaaacttacgatttcatcgtaaatcatcatttttcagagttacacgtattcccttattctcctagaataggaacgcctgctgcaagaatggacaatcaaattgatgaagaaacaaaaaatgttcgtgtacacaaactaattagtctaagtaatcaattagccaaagaatatgcttctaaatttgaagatgaagttttagaagttatacctgaagaaatgggtgaagaaccacatacacttgttggctatgctgacaattatatgaaggtaagatttgaaggagatgactcattaataggtcaaatagtaaaggtcaagatagttaaagccaattatccaattaatgaaggcaaagcaatacgtgttgttaaacatgcaacgaatcaatctgaaaaagaagtacttgtttaa

SEQ ID NO: 7940 - DNA, 738 bp, Staphylococcus epidermidis
atgaatcaaagcgctgatgaaaatcagtgcttttttattgaaaacaaagaagactatcatcatatcgtgaatgttatgcgctataaagaaggacaaaatattattgtcactttttcagatgaaaatgtattcaaatgtaaaattatttcaataaacgatcaatcgattgaaattaaattagtagaaaagcaacaaattaacactgaactacctcagaacattacaatatgtagtggtttaatcaaagcagacaaatatgaatggatgatacaaaaagcaactgaaatgggggcaaatgagtttatagctgtagccatggaacgttctgtggtcaagctcaatgattctaaagtagaaaagaaattatcgagatggcaaaaaattataaaggaagctgcagaacaaagttatcgtttaacaataccaaatataaaatttaagtcgaatttaaaagaaatttatggtatgataagtcaatatgactatgttcttatagcatatgaagaacaagcaaagcacggtgaattaagtcaatttaagcaaacaattaaacaatttaagacacaggatcgtgttttaatcatatttggacctgaaggtgggctatcagatagtgaaatttcattattcggtgatgtaagtactatagttggattaggtccacgtatcttgcgtgctgaaactgcacctctttacgctttaagtgcagtaagttatgaaaaagaattattggggtga

SEQ ID NO: 7941 - DNA, 939 bp, Staphylococcus epidermidis; identical to SEQ ID NO: 6040

SEQ ID NO: 7942 - DNA, 1122 bp, Staphylococcus epidermidis
atggccaaaagagactattatgaagtcttaggcgtaaacaaaagcgcttctaaagacgaaattaaaaaagcttatcgtaaattatcaaaaaaataccatccagatataaataaagaagaaggcgcagacgaaaaattcaaagaaatctccgaagcatatgaagttttaagtgatgaaaacaaacgtgcaaattatgatcaatttggtcatgacggaccacaaggcggatttggaagtcaaggctttggtggcagtgactttggtggatttgaagatattttcagctcattctttggtggcggttcacgtcaaagagatcctaatgcacctcgcaaaggtgatgaccttcaatacacaatgacaataacatttgaagaggctgtattcgggacaaaaaaagaaatatcaataaaaaaagatgtaacatgtcatacatgtaacggtgatggggctaaacctggtacaagtaaaaaaacttgtagctattgtaatggcgctggtcgtgtttctgttgaacaaaatactattttgggtagagtgagaactgaacaagtttgtcctaaatgtgaaggtagtggacaagaatttgaagaaccatgtccaacatgtaaaggaaaaggtactgaaaataaaacagttaaactagaagtaactgttcctgaaggcgtagataacgaacagcaagttcgtttagctggagaaggttcacctggtgttaacggaggaccacatggtgacctatatgtggtgttcagagttaaaccatctaatacatttgaacgtgatggagacgatatctactataatctagatattagcttttcacaggctgcactaggtgatgaaattaagatacctacattaaaaagtaatgttgttttaaccattccggcaggtacacaaacgggtaaacaattccgacttaaagataaaggtgtaaagaatgttcatggttatggccacggggacttatttgtcaacataaaagtggttacaccaacaaaattaaatgaccgtcaaaaagaattattaaaagaatttgctgaaattaatggtgaagatataaatgaacagtcatctaatttcaaagatagagcgaaaagattctttaaaggagaatag

SEQ ID NO: 7943 - DNA, 1830 bp, Staphylococcus epidermidis
atgggtaaagtaattggaattgatttaggtacaactaactcttgtgtttctatcttagaaggagatgaaccaaaagtaattcaaaacccagaaggtgcacgtactacaccatcagtggttgcatttaaaaatggtgaaactcaagtgggtgaagtagcaaaacgacaagctatcacaaaccctaacactgtacaatctattaaacgtcatatgggtacagattataaagtagatattgaaggtaaatcatatacaccacaagaactttcagcaatgattttacaaaatttaaaaagcactgcagaaaactatttaggggatacagtagacaaagctgttatcactgtccctgcttatttcaatgatggtgaacgtcaagcaactaaagatgctggtaaaattgcaggcttagaagttgaacgtattatcaacgaacctacagctgctgcacttgcttatggtttagataaaactgaaacagatcaaaaggttctcgtatttgacttaggtgggggaacatttgacgtatctattctagagttaggcgacggcgtatttgaagtattatcaactgccggagataataaacttggtggcgatgacttcgaccaagtgattattgattatcttgtttcagaattcaaaaaagagaatggtgtagatttatcacaagataaaatggcattacaaagattaaaagatgctgccgaaaaagctaaaaaagatttatcaggtgtttctcaaactcaaatttcattaccattcatttctgctggagaaaatggcccattacacttagaaattagtttaactcgttctaaatttgaggaattagctgattcattaatcaaaaaaactatggaaccgactcgtcaagcattaaaagatgctggtttatctacttcagaaatagatgaagttattttagttggtggttcaacacgtattccggccgttcaagaagctgttaaaaaagaaattgggaaagaaccacataaaggtgttaacccagatgaagttgtagcaatgggtgctgctattcaagctggtgtaatcacaggtgatgttaaagatgtagtattacttgatgttacgccattatctttaggtatcgaaattatgggtggacgtatgaacacattaattgaacgtaatactactattccaacctccaaatcacaagtttattctacagcagctgacaatcaaccagcagtagatattcatgtattacaaggtgaacgtccaatggcatctgacaacaaaactttaggaagattccaattaactgacattccacctgcaccacgtggtgtacctcaaatcgaagtaacatttgatatcgataaaaacggtattgttaacgttacagctaaagatttaggtactaataaagaacaaaacattacaatacaatcaagctcatctctatctgatgaagaaatcgatcgcatggtgaaagatgctgaagaaaatgctgaagcagataaaaaacgtcgtgaagaagtagacttgcgaaacgaagcagatagtctagtattccaagttgaaaaaacagttaaagatctaggcgaaaatattagtgatgaagataagaaaaatgctgaagagaaaaaagatgcacttaaaacagcattagaaggtgaagacatcgacgatattaaagctaaaaaagaagaacttgaaaaagtaattcaagaattatctgcaaaagtttatgaacaagctcaacaagcacaacaacaagctcaagaagaacaaggttctcaagatagtactgttgaagatgcagactttaaagaagttaaagatgacgaagataaaaaataa

SEQ ID NO: 7944 - DNA, 633 bp, Staphylococcus epidermidis
atgtcagaaaaagatcagtcagtgaataatactgaggaagatttcaatgtagaaactgaagacaatcagaatgatacaaatattgaaaactcagtatctaacacagataatagtgaagctaatgctagcgcttcagaaaataattcagaagaaagtatcaaggatgaagagtcagagtctcaagatactaaaattaaagaattagaaaagcttgcaaatgacaatgaagaaaaatatttaagattatatgctgaattcgaaaattataaacgtcgaattcaaaaagaaaatcaaattaatgctacttataaagctcaaggtgttttaactgacattttaccgtctatagataatattgagcgtgcactacaaattgaaggtgatgatgaatcgttcaaatcacttcaaaaaggagtgcagatggttcatgaaagtttactaagagctttaaaagacaatggtcttgaagaaattttagctgaaggtaaggaattcgatcctaatttacatcaagctgtcgttcaagatgacaatcctgattttaaatcaggagaagttactcaagaattacaaaaaggatacaaacttaaggatcgtgttttaagaccatcaatggtaaaagtaaatcaataa

SEQ ID NO: 7945 - DNA, 978 bp, Staphylococcus epidermidis
atgattacaaaaagacaattaagcatccttaatgctattgttgaagattatgttgattttggacaaccgattggatctaaaactctaattcatcgtcatcacttggatgtgagtccagctaccattagaaatgaaatgaagcaacttgaagaaatgcatttcattgagaagacacacacatcttctggaagggtgccatctgaatcagggattagatattatgtcaatcgccttttagaacaaacatctcatcaaagtcaaaacaaaattcaacgtttaaatcaattattaattgagaatcattatgatagttcgactgcactcacaaactttgcacacgaattatctatgaaatctcaatatgcaacgttggtagtccgccctaatcataaacaagatgttataaatgatatacatcttattcgtgctaacaaccatttgattattttagtaatggtattttcctctggacatgttgaaaatatacattttgtatcacatgctcaactaaataatattaatttaaataaaatagcaaactttttgaccgaacatttcagttttaatcgtaaagtactaactcaaaacattgagtcttactttagtcaaaaagaagagctattacttgcaaatgaagtagttgagatgataaatttacaaattggtaatcaaagtaatagcatttatatgggtggaaaggttaaactgattgatgcgttaaatgagtccaacgtttcatctattcaaccgattcttcaatatatagaatcaaataaaataactgaattattagaagatatatcaacatctcaaatcaatgtccgaattggtaaagagattgatgatagtttaagcgatatatcaattgtgactagtcagtatcattttgatgagtcactaaaaggtcaaattgcagtaatcggaccaactgcaatgcattatcaaaatgtaattcaattattaaaccgtatatggtag

SEQ ID NO: 7946 - DNA, 1125 bp, Staphylococcus epidermidis
gtgaatgtaaaaagtgcatatattcatattccattttgctatagaatttgtacttattgtgatttcaacaaatactttatcgataaacagccagttgatgaatacttagacgcacttattagcgagatgcaagttaaaaataatagagaccttgaaacaatgtatgtcggaggtggtacaccgacagccttgaatatgagacaacttgagaagctacttagagcaattaatcaaacatttacaattagcggagaattttcttttgaagctaatcctgatgagttaacttatgaaaaagttgcacttttaaaacaatatggcgtaaatagaatatcgatgggtgtacaaacatttaaacctgaattattaaaaattttaggcagaacccataaaactgaagatatatatgatgctgttagtcatgcccgaaaggcaggtattgaatcaataagtttggatttaatgtatcatttaccacaacaaactatcgacgattttaaagacagcctggagcgtgccattgcattggatattgatcatatttcaagttatggattaattcttgaacctaaaacccagttttataatttgtatagaaagggacatttaaaattaccaaatgaagatttaggggcagaaatgtatcggtttttaatggagcgtatgaaaaactcaccatttcatcaatatgagatttctaattttggtaaacttaatcatgaatcaaaccataataaagtatattggttaaatgaagaatactatggctttggtgctggtgcaagtggttatgtaaacggtgtacgttacacaaatcttaatccagtaaatcattatattaaagcgataaatgaagggaaaaaaccaatactatctgaaacgtctcctacttataacgaaagaatggaagaagaaatgtttcttggtttaagaatgaatcaaggtgtgagtaaaagccgttttaagaaaaagtttaataaattaatcgatgaggtgtttgttgaaactattaaagatttgaggtgtaggggactcataaaagaagaaggagaatttatatctttaaccgaacgcggaaaagttataggtaacgaagtttttgaagcatttttactaaactcataa

SEQ ID NO: 7947 - DNA, 1824 bp, Staphylococcus epidermidis
atggataagcaagaacgatacaatagaagagaaaatattagaaatttctccattattgctcatatagaccatggtaaatcgacattagctgatcgaattttagagaatacaaaatcagttgaaactcgagaaatgcaagatcaattacttgactctatggatttggaaagagaacgaggcatcactattaaactaaatgctgttcgattaaaatacgaagctaaagatggagaaacttacacatttcatttgatagatacaccaggacatgtcgactttacatatgaggtttctcgctcattagctgcatgtgaaggtgcaattcttgtagttgatgctgcccaaggtatagaagcacaaaccttagcaaacgtttatttagcattagataacgatttggaacttttgccagttgttaataaaatagacttgcctgcagctgagcctgatagagttaagcaagaattagaagatgttataggtatagatcaagaagatgtagtacttgcaagtgctaagtcaaatataggtattgaagaaattttagagaaaatagttgatgttgtaccagcaccggacggtgatccagaagccccacttaaagcacttatctttgattcagaatatgatccatacagaggagtaatatcttcaattcgaattattgatggtgttgttaaagctggagataggattaaaatgatggctaccggtaaagaatttgaagttacagaagtcggaatcaatacacctaagcaactaccggtagaagaattaacagttggtgatgtgggttatattatcgcaagtatcaaaaatgttgatgattctagagtaggtgacacaattactttagctgaaagacctgctgacaaaccgttacaaggatataaaaagatgaatccaatggtattttgtggtctattccctattgacaataaagactataatgacctaagagaagctttagaaaaattacaacttaatgacgcatccttagagtttgaaccagagtcttcacaagcacttggttttggatacagaactggatttttaggaatgttacatatggagattattcaagaaagaattgaaagagaatttggtattgaactcattgcaacagcgccttctgttatttatcaatgtatcttaaaagatggttctgaagtttcagttgataatccagcacaaatgcccgaaagagataaaatagaacatatttatgaaccatttgtcaaagctacgatgatggtgccgaatgattatgtaggtgcagtgatggaattatgtcaacgtaaaagaggtcaatttataaacatggattatcttgatgatataagagttaatattgtttatgaaattccattatcagaagtagttttcgatttctttgatcaacttaaatctaacacaaaagggtatgcttcttttgattatgaatttattgagaataaagaaagtaatcttgttaaaatggacatattactgaatggagataaagttgatgctctaagttttattgtccatagagattttgcgtatgaaagagggaaagcgcttgtcgaaaaattaaaaacattaattccacgacaacaatttgaagtgccagttcaggcggctattggtcaaaaaattgttgcacgaacaaacattaaatctatgggtaaaaatgttttatctaaatgttatggtggagatatcagtcgtaaacgaaaacttttagaaaaacaaaaagcaggtaaagctaaaatgaaagcagtaggcaatgtagaaattccgcaagatgcatttttagcagtattaaaaatggacgatgaataa

SEQ ID NO: 7948 - DNA, 252 bp, Staphylococcus epidermidis; identical to SEQ ID NO: 3381

SEQ ID NO: 7949 - DNA, 975 bp, Staphylococcus epidermidis
atgagcaacaatatcttcactgtctacggtgaagtaccagaattagtcgaaaagaaaacaaaagaaattgtaaatgattatctaggacaaaagatagatgactttaattatgtaaaatacaacttgtatgagagtgacctaactccgattattgaagagacacttactatgccttttttctcaaataaaaaagcaattgttgtaaagaactcgtatgtttttacaggagaaaaattttctaaagatttaaatcacaattctgacgagcttataaaatttttagaaaaatatgatggtgaaaatctcattatctttgaagtgtatcagcctaaactagatgagcgcaaaaaactcacgaaaacgttgaagaaaaatgcacaacttaagaaaattgaacaaatgtctgaaaaggaattaaagcattggattaaaaatacactaaacaataattataaagatattaagcaagatgctcttgaattatttattgaattaactggtgttaactataatattgtttctcaagaattagaaaaattaattttattcataggtgaaagacctataattaataaagatgatatcgatttaattattaatagaagtttagaacaaaatgtatttctactaactgaatacattcaaaaaggtaataagaataaagctatacaattagtcaatgatttaattattatgaaagaggaacctataaaattactggcattaattactagtaattatagattatattatcaatgtaaaattcttagtcaaaaaggctatagtgggcaacaaattgcaaagactgtaaatgcacacccttatagagtaaaactagcactcaatcaatcccgacattataaactagaaagtttatttaacattataaacgcttgtgcagagactgactacaaactaaaatcatcttatatggataaacaactcattttagaattattcatactatctctataa

SEQ ID NO: 7950 - DNA, 2217 bp, Staphylococcus epidermidis
atgttttacattgctcttgcttttttggtaggggtactttggataaaattcaaagtaatctctatctccttaatattaactcttttgttactaattatgataaaaaggcttaatattataatactattattaatgtttatttcagctataagttcattttttttaataagttcctataaccaaactgatattaaaaacttaaatagtttatatagtgaaccgtttattgatgattttgttcgtttcaaatcttttacgcttaaatcaacatactatactggcatattaaattataaaaataaagactatagatacttttacaaaatattaaagtcaaatttcaagcaagatttaactcataaaagttgtcgagttaaaggagaatttaaattcgaaaaagagttgcccttgttggatatttcaacagttcaatttaagtcttgccaagaaaacaatattttcactcctatatatcatcatcaaaattatatcaccaaaataattcataaatctggcgtcacgcatcctgaaagaatattagcgttgataacaggtgatacctctctaattgatgaatattacaaatctaacatcaaagatataggtatttaccatttactagctataagtggtacacatgttggtacaattattgtcctcgtttatcaactgttagtacgcttaaatatacctctagttctcattaaaggtgtaactattttactattattaatctacgctgtttatactggatttgtacctagtgccatgcgtgccatttcaattgcaatcattatacttatgttgccaatccattttaggaaaagttctatacatgtgctttcatttatatttgtgttaatgattctcttaaatcctcaatttataaatcacattggttttcagttctcttttttgataagtttatttattatattggcaaaaccatatataagtgctttaaaaccacttaaatgtttgtttattattagttttttggctcaattaggttcaattgtaattaatacctatcattttaatcaatttcaatggataggtttgctatctaattttatatttgttccattctattcttttatattatttccttcggtcattatctactttattttaattcacttttttcaacatagcttcctattaaatacttatataaatatgctttttaaaattcatgactggctagttcaattatttttaaatttaaatcattttaagtggtacattcctaaattaaaccaatatagtttacttattttgattatactaacgttaatttttctttacatacttgtctatagagggtttgttacatccgtactaagttttttaattgttttaatcatttttacacatttaattagaccacattatgccgagttaacactttttgatgtgggtcaaggagatagcattttattcaaaacaaagtcaaataaaagtgttttgattgatacaggtggtaaaagaaatgaaaatgtaagttttaaacataataatattgccaaatataaaattttaccaagtattaagaaaaagggtatcaccactataaattatttagtaattacacatcctcatgccgatcatatgggtgaattaatatattttttaaataatattaatgtgaataatctcgttttaaatattgaaagtttcccattagaattacttaaagaggttacgacaaaatgcaaggaaaaaaagataaatatcttggatgtaaatcaagttaaaaaaatagatattgataatagtaagataagctttttaaatagttttataccattaagtgatgataaaaatgaacattccattgttacattaattgaatataacggcattaatattctactgatgggagatgcaactgttaataatgaagacattctaatgaagagatataatttaccaaaaatagatattttaaaagttggtcatcatggaagtaggacaagtagttcggaattatttattaaagatatagaacctaaaatcagtcttatatctagtggtaaaaataataagtatcatttacctaatttggatgttattcaaagattaaaatattatggtagtaaagtttttgatactcaagacaacggggaattaactataaatttagatgaagaagtttacatagtctaccgtgataatttaaatcaaaagagtttagctagagaaagtgtatcgtaa

SEQ ID NO: 7951 - DNA, 462 bp, Staphylococcus epidermidis; identical to SEQ ID NO: 3384

SEQ ID NO: 7952 - DNA, 675 bp, Staphylococcus epidermidis
gtgtttaatattaacagacgatatatcgatttttttatgaaatggaagttgtacatcttaattatattaataatgttaacaacattctttttttacttactcaatgataacaataatgatttgatacagaatagtcaggaaagacaatctaaaatatctgaccagcaaataaaaaatagcaaaaagttaaataaaaaagaagtgtctattcaaaaagataatacaaaagaaactaaaatatttatcgatattaaaggtgctgttaaacatccgaatgtatatgaaatggcttcttcgaatagagtcattgatgctttaaataaagcagaggtattaaaggatgcagacttatcacaattaaatctttctgaaaaattagttgatcaaaaacttatctatgttcctaaaaagggtgagaatagtatgaaaatcaactcacagcaatcaacattgaattcgagtgacgtaaaaatcaacacgaatcaacctttaaatttaaactctgctactgaagaacaattgaaaaacataccaggaataggtccaagtaaagctaaagaaattttaaattacagagaacaaaatcatggatttaatagtatcgatgacttaatgaaaataaaaggattcggaaagaaaacatttgaaaaactgaaagaacattttactatttaa

SEQ ID NO: 7953 - DNA, 720 bp, Staphylococcus epidermidis
atgaatcaatatgaagatatgagtttagtatatgaccaacttactcaagatcaaccgtatcattcgtggtttaatattgttgagcatttcttaccttctgatagtcaagatttgttagatattggttgcggtactggcaacttaacacaattactaacgtcactaggtgaagtcactggtatggatattagtgtagatatgttatcaatagctagacaaaaaacaaatcaagtgaagtggatcgaaggtaatatgactcactttaatttgaacaaaaaatttaatatgattacaatattttgtgattcactgaattatttagaaacattaaatgacgtaaaaatgacattcgaaagagtgtatcaacatttaaataaaaatggtgtttttatttttgatgtacatactgttcataaaatgaaaacattatttaataataaaagttatattgatgaatctgataatgtttttgtaggttgggatgcaatatgtggggatgaaccattaagtgtttatcatgaaatgactttctttgtatcacagcaaaatggattgtatcaacgctttgacgaatcacattatcaaagaacatatgaggaacaaatttatcgaaatttactaaaagatgttgggtatcatagtgttaagacttttacagactttaacattcacagtcatgaagaagatgcccatcgcttgttttttgttgctaaaaaataa

SEQ ID NO: 7954 - DNA, 354 bp, Staphylococcus epidermidis; identical to SEQ ID NO: 3387

SEQ ID NO: 7955 - DNA, 585 bp, Staphylococcus epidermidis
atggagataagtagagctaaagaactggtaaaagaaaaactgcctgataaacgttatcaacattcattacgagtggcggatacagcagttaagttagcagaaatatacgatggtgatatcaaaaaagctgagttggcaggtatattacatgattactgtaaatacgaagacttaagtacaatgtatcaaattgttagacaatacgaacttgaaagtgatttgcttagctatggtggagagattcttcatggaccagtatgtgcggcacttatgaagcatgaatttgatgtaaatgatgaagaagttttacttgctataaaatatcatacgactgggcgtcaacaaatgactaaaacagagaaacttgtttttattgcagactatatagagcctggtagaaaaacgcctggagttgaagaaattagagatatggcatacaatcaaggtagcttagataagacaatttatgagatttctaagcgtactgtattatttttaatagaaaaggatattactgtatatggcgccacaattgcgtgtttaaattattataattatagcgatgaaagaataaaggatgattaa

SEQ ID NO: 7956 - DNA, 576 bp, Staphylococcus epidermidis
atgaataaaaaaatcgttctctttggcggtcaatttaacccgattcacactgctcacttagcagtagcaagtgaggtttatcatgctattaaaccagatatatttttctttttgcctagttatatggctcctttaaagcatcataatacacaattatattctgaacatcgagtgaaaatgatacagctcgctattaaggagattggatttggtgaaatttgcactactgatttagatagaaaaggtccaagctatacgtatgaaaccattttgcatctcaaagaaatatatcataatgcacagttatactttattattggaacagatcagtataatcaattggataagtggtataaaattaatgaattaaaaaaacttgtaacctttattgtagtgaatagagaaactgataaccaaaatgtaagtaaagagatgatttctataaagatacctcgaatagatataagctcaacaatgattagaaatagagtgagaaggaaccaatctataaaagttttagtacctaaaagggtagagaattatattaaagaggaggggttttatggagataagtag

SEQ ID NO: 7957 - DNA, 294 bp, Staphylococcus epidermidis; identical to SEQ ID NO: 3390

SEQ ID NO: 7958 - DNA, 810 bp, Staphylococcus epidermidis
gtgaaatttgcagtaattggaaaccccatttctcattcattatcgccattgatgcatcatgctaattttcaatctttaaatttggaaaacacgtatgaagcgataaatgtaccagttaatcaatttcaagacattaaaaaaataatttcagaaaagagcattgatggattcaatgttactattccacataaagaacgtattattccgtacctagatgatattaatgaacaagcgaaatctgttggggcggtaaatacagttttagttaaagatggtaagtggattggttataatactgatggaattggttatgttaatggtttaaaacaaatatatgaaggtatagaagacgcttatatattaattttaggtgcaggtggagcaagtaaaggtatagcaaatgaattatataaaatcgttcgtccgactttaacagttgcaaatagaacgatgtctcgttttaataattggtcgttaaatattaacaaaataaatttaagccatgcagaaagccatttagatgaatttgatattataataaacactacacctgctggtatgaacggcaatacagattctgtaatttctttaaatcgtttagcttcacatactttagtaagtgatattgtttataatccatataaaacaccaatactaaaagaagctgaacaaagaggtaatccaatctataatggtcttgatatgttcgttcatcaaggtgctgaaagttttaaaatttggactaatctagaaccagatataaaagcaatgaaaaacatagtaattcataaattgaaaggagaattatga

SEQ ID NO: 7959 - DNA, 1101 bp, Staphylococcus epidermidis; identical to SEQ ID NO: 3392

SEQ ID NO: 7960 - DNA, 528 bp, Staphylococcus epidermidis; identical to SEQ ID NO: 3393

SEQ ID NO: 7961 - DNA, 687 bp, Staphylococcus epidermidis
atgataggaattattggagcaatggaagaagaagtgacgattttaaagcgtaaattgaatgatatgaatgaaataaatattgcgcatgttaaattttatgttggcaagctaaaccacaaagaggtggttttaacacaaagtggtataggtaaagttaatgcttctatctcaacgactttgttaatagaaaaatttaatccagaagtcgtcattaatactggatcagcaggtgcactagatcaaacactatctattggagatatattagtgagtaatcatgtattatatcatgatgctaatgctacagcgtttggttatgaatatggacaaatacctcaaatgcctaaaacttatactactgatcctactttgttgaaaaaaacaatgcatgtattagaacaacaacaactgaatggtaaagtaggtatgattgttagtggtgatagttttataggtagctcagaacagcgacaaaaaattaagcaacaatttccagaagctatggctgtcgaaatggaggcaactgcaattgcgcaaacatgttatcaatttaaagtaccatttatcgtaactagagctgtttctgatttagcaaacggtaaagccgatatttcttttgaagaatttttagataaagcagctttatcatctagtgagatagtttcattattagtagaatcattataa

SEQ ID NO: 7962 - DNA, 1245 bp, Staphylococcus epidermidis
atgggggaaaatacaaaacaagatttcaatcaaaaaggacaaaattttaaattcacaaaaaaacatagacgattattatatggttcagtttttttaatggctacatcagctattggtccagcattcctgactcaaactgcagtgtttactgcacaattttatgctagttttgcatttgcaatattaatttctattattatagatataggcgctcaaataaatatttggagaatattagtggtaactggattacgtggacaagaaatatctaataaagtattacctggacttggtactattatctccatactaattgcatttggtggtctcgcatttaacataggtaatattgctggtgcaggtttaggtttaaatgcaatgtttggttttgatgtaaaatggggtgctgcaataacagctatttttgcgatacttatctttgttagtagaagtggtcagaaaataatggatgttattagtatgattctaggtatcgtaatgattttagtagtcgcttatgtcatggttgtttcaaatcccccttatggagatgcattagtacatacatttgcacctgaacatcctttcaaacttatattacctataattacattagttggtggtacagtagggggttatattacttttgcaggtgcacatagaattctagattctggtataaaaggtaagtcataccttcctttcgtaaatcgatctgctgtagcaggtattttaacaactggtgtcatgcgcaccttattgtttttagctgtactaggtgttgttgtaactggcgttacgcttagttcagaaaacccaccagcatcagttttccaacatgcattaggtcctataggtaaaaatatttttggcgtagtaatatttgcagcagcaatgtcctcagtaattggttctgcatatacaagcgcaacatttttaaaaacactacacaaatcgttactcaataaaaataatcttatcgttattacatttattgtaatttcaacttttgttttcttatttattggtaaaccggtgagtttacttataatagctggtgcgattaatggttggattctaccaatcacattaggtgcaattctcattgcaagtaggaaaaaatctatcgttggtaattaccaacacccaacatggatgcttgtttttggtattatagccgtaattgtcacaataatgactggtatcttttcattacaagatttagcaagtctttggaaaggttaa

SEQ ID NO: 7963 - DNA, 753 bp, Staphylococcus epidermidis; identical to SEQ ID NO: 3396

SEQ ID NO: 7964 - DNA, 1362 bp, Staphylococcus epidermidis
atgatgtatcgatgtttgattgcaaatagaggcgaaatagcagtaagaattataagagcttgtagagagcttaacatagagacagttgccatttatgcaaaaggtgatgaaaatagcttacatgtaagtttagccgatcaagcaatatgcataggtgaagcaaatccattagacagttatttaaatattgatcgtattatatctgctgcaaaagttacagaatcaaacgtaattcaccctggctatggtttcttatcggaatctacgaattttgcgaaagccgttgaagacaatcatatacattttattggacctagtaagacaactatggaaatgatgggggataaaattactgccagacaaactgttaaacaagcaggagtacctgttataccaggttctaatgatgctgttcaaagtgtagatgaaattaaattattatccaaagaaataggatttccagttgtactaaaagcagctagtggtggtggtgggaaaggcatcagaattgttaaagaagcatctcatttggatcaggctttgaaagaagctaaaagtgaaggacaaaaatattttaatgatgatcgagtgtatgtagaggcgttcataccagtagcaaaacatgtagaagtgcagattatcggagacggtaaaaataactatgttcacttaggtgaacgcgattgttctgttcaacgaaagaatcaaaaattaatagaagaagcgccttgtgctgcattaactgaagaaagaagaacaagaatatgtggcgacgcagttaaagtagctcaagcttcaagatatcgtagtgctggaacaatagaatttttagttacagaagatgcacattattttattgaaatgaatgctcgtattcaagttgaacatacagttacagaaatgcgtgctgatagagacctattacaagctcagttatatttattaacacacggtgaattaccattcactcagaaagatattttatttaatggtcatgtaattgaggcgcgtataaatgctgaaaatcctgaaaaaaactttttacccactccaggaaaagttaataaattacacttaccacaaggatttaatatacgtgtagattctttactttacacaggttatcaggtttctccttattatgattcacttgtagctaaagtgattgtaaaggattctaatagacaaactgctattaataaattaaaagttgcgttagatgaaatggtcatcgaaggttttactactacagctgactttttatatgcggttttaaattatccaatatatgcaaaaggcgatgccagtaaagtagatataaaatttcttgaaaaacatcaaatcattaaagaggtgaaatga

SEQ ID NO: 7965 - DNA, 441 bp, Staphylococcus epidermidis
atggatattaaaaaaattgaggaagtcattaaattggtaaaagctaatgatgtaaaaaaatttaagtataaggactctcataatgaaatagaacttgattttactaatggagcatctcaacaacattctcaacaatcatctcaagatattcaacaagagaatattaaatccttagatgaaaagcaagagtccatatcaaatgaccagcaagagattaaatctcctatggttggaacatttttcttacaagatagtaaagaactaacagaacctaagattaaagttggcgatactgtaactgaaggagatattatcggttacattgaagctatgaaagttatgaatgaagtaactacggatgttactggtgaggtcactgaaatattagtagaacatggagacaatgttgaatatgatcagctactagtcagagttaaatag

SEQ ID NO: 7966 - DNA, 1005 bp, Staphylococcus epidermidis
atgagtattaaaattttaaagcctggcctgttttcaacaattcaagatataggtagattagggtatcaggatttaggattttctgaagcaggtgcattagattactatagtttatctattgcccaaaaacttatcggaaatcatggaccagcaattgaatatactttagtaggtcctaatatagaatttttaacagacaatacttttgccattgtcggtggtgattcagaaccgaaacttaatggtaacaaaattgacttattaactgtttatcatgtaagaaatggagaccaattagacattggtcaaatcactgaaggagcaagaggatatattgtttttggacacccacttaaaattaataaagtggctcaaagctattctacacatgttagaagtggaatgggcggatttaaaggtcgtgcattaaagaaatacgatgttattgcaactcaagtaaatcataactataaaactaatttaggaaaaacaattgatttctcatctatacctgataataattacatacacgtcattgaaggacctcagatcaatgaatttgatgaagaaacgatagctaaattcgtaaatagcgatttcaaaatttctgatcaatcagatcgaatgggatacagattaaaaggtaatacagtagcacctaaaaatagtgctgatatcatttctgaacctgtcgctttgggaagtattcaagtacctaacgatggtaatcccattattcttttaaatgataaacaaacaattggtggttatacaaaaattgcaacggtaacacaattagatttaagaaaattagcacagatgaagcctggagacattatacagtttaaatggataactgttgaagaagcttcaaaaaagcttaaagaatttaatactaaatttgaacaattattaaagcgttttgatgagcaaccattgtttaacctaaatcaacttagacatacttctaataaaatcgcagaaataattaaggaggatagataa

SEQ ID NO: 7967 - DNA, 732 bp, Staphylococcus epidermidis; identical to SEQ ID NO: 3400

SEQ ID NO: 7968 - DNA, 147 bp, Staphylococcus epidermidis
atgagtgttgcttcaacttcacatcatttaagacttttatataaaaatgaggtacttgatttttataaagagggaaagatggcatattattttattaaagacgatgaaataagagaatttttctctaaaaatcaggagggtttttga

SEQ ID NO: 7969 - DNA, 366 bp, Staphylococcus epidermidis
atgtttgaaatctttagacaataccgcaatgtaatagcgcatggacaaagattttattccttcacttctgacttagatacagctcaattatcattaaattttattaataacatgctcgaatatgaatttatggacaaatcaaaatataaaaaaggtataggaaaaaacgatatttattctttaataatttctataatgatttttaccaaagcagcaaatattagagaaaatctggttgaagaattattagagatatatgaaaaaatggaaaaatattgtaaatacaatttatttaatgtaataggcatagaaaaaatagatattgaaaaactctgggtattaaataggttacttaaatgcctataa

SEQ ID NO: 7970 - DNA, 192 bp, Staphylococcus epidermidis
atgcgaaatatagaagcgattgaaacacttataaatacttcaaaatattctaagccatatttaagttatgaagaacaattacttttattaaaacatagaggaattaaaattgaagatgaaagatttgctttgcggcaacttgaaacaatttcatactattctttaataaatgcatatactcctcttttttaa

SEQ ID NO: 7971 - DNA, 117 bp, Staphylococcus epidermidis
atgacaaataaatatttaatgcttcttgtagtaatgttattaattacaatagatttaatattattttgttcagatattgataaatcaaaacaatttaaaacgttaaagaaaaaataa

SEQ ID NO: 7972 - DNA, 1029 bp, Staphylococcus epidermidis
atggatttgcttataggtactttatttttaattttagttttagttgtttttactctatttacatacaaagcacctagtgggatgaaagcgatgggtgctttagcgaatgcggcgattgcatcgtttttagttgaagctttcaataaatatgtgggtggtcaagtatttgggattaaattcttagaagaactgggagatgctgctggaggtttaggtggtgtggctgcggctggattaactgcattagcgattggggtatctccagtttatgcactagttattggggcagcttgtggaggtatggacttgttaccaggatttttcgctgggtatattgtaggctacatgatgaagtataccgagaaatatgtgccagacggtattgatttaattggttcaatcattcttctcgcacctatagctaggttaattgctactggattgacgccagtggttaataacacgttaattaaaattggggatattatacaaagtagtacagatgctaacccgttgattatgggaattgtattgggaggtattattacagtagtaggtactgctccattaagttcaatggctctcactgcattgcttggtttaacgggtgcgcctatggctataggtgccatggccgcatttagttccgcgtttatgaatagtgcattgttccatcgtttgaaattgggagaccgtaaatcaaccatttcagtcggaatcgaaccgctttctcaagctgatattgtttccgctaatcctattcctatttatgtcactaatttctttggtggggcaattgccggtattataattgcttggtcaggtatgattaataatgcaactggcactgctacacctattgcaggttttttagtgatgtttggttttaatagtttaacgaaagtgattatctatggtgtggttatggcgattataggaactattgctggtattgtagggtctattgttttcaaaaagtaccccattattactaaaaagcaaatgttagaacgggacacaacgacataa

SEQ ID NO: 7973 - DNA, 384 bp, Staphylococcus epidermidis; identical to SEQ ID NO: 4049

SEQ ID NO: 7974 - DNA, 1203 bp, Staphylococcus epidermidis
atggcgaaaatacctgtaactgtattaagtggatatttagggtcgggcaaaacgacattgcttaatcatatattaaaaaatagagaagggcgacgcattgctgtcatagtcaatgatatgagtgaagttaatattgataaggatttagtagcacaaggtggcggcttatctagaacagatgagaaattagtagaactttctaatggatgcatatgttgtactttaagagacgatttgttacgagaagtcgagcgcttagttcacaaagggggtatcgatcaaattgtaattgaatcaactgggatatctgagcctgtaccagtagctcaaacgttctcatacatagatgaagaattaggtattgatttaacctctatatgtcgattagatacaatggtgacggttgtagatgcgaatcgctttgttaatgatattcgtagtgaagatttattggcagaccgtgatgaaagtgttgatgatgaagatgagcgtactattgctgacttactcattgatcaagtagaattttgtgatgtgatgattatcaataaaatcgatttgattagcgacgaagctttagaaaaattagaaaatgtattacgtgcattgcaacccgaagctaaaattattaaaacagtaaatgctaaagtggaattatcagatgtacttaatacgcaattatttgattttgagaaggcaagtgaatcagctggatggatcaaagaattaacagctggaggacatgcgacacatacgccggaaacagaagagtatgggattacatcatttgcttatactagacgattaccatttcatgcaaaaagatttcatcaatggctagaacaaatgccagaaaatattgtaagaacaaaagggattgtatggttagcgcagtataatgatgtagcgtgtttgttatcacaggctggttcatcttgtaatattcaccccgttacatactgggtggcaacaatgagtgaaagtcaacagcaagctattttggaggcgcgtcaagatgtagtagaagattgggatatcgaatatggagatcgtcaaacgcaatttgtaattattggtacggatttagatcaagaaaaaatttcccgggaattagatgcatgcttaattcatagtagtgagattgatgaagattggcgattactagatagtccgtatcaatggacttatgatcgacgaatgtaa

SEQ ID NO: 7975 - DNA, 264 bp, Staphylococcus epidermidis; identical to SEQ ID NO: 4047

SEQ ID NO: 7976 - DNA, 1497 bp, Staphylococcus epidermidis
atgttaagttcagagttaattttgtttatgttttttattacacttgtcattgctatactgagtggattaatatttttgaatcatcgagttcccattcaatatattaaatttcatatatatttacttgttttacctatcattacgggattaagtggattaatatttttcggtgaaagggcgaatgttggaccttttgtagttgatcatcttacttggttaatgatgacatttattttgactttaggctttatcattcaaaagttttctatgcgttatttaattggcgacatgcattaccgtaaatattttccgttttttacattaattactgcatttgcttcattggcatggttaagtggagacttaaggttaatgaccatgttttggggtgcaacattatttgtgttaacacggctcattaaagttaacaaattatggaaggtgcctagggaagcagcaagaatttcagcttggtcatttatattggcatggttgtcgttattgattgctgtcattttattgtatatcgctacaggagattggtatatttattcgaatatgtcagatgataatgcaatcaattatggaatgcgtctctgtatcaatttacttattgttttagctgtgattattccggcggcacaatttccatttcaaggctggcttattgaatctgtagctgcgcctacgccagtttcagctattatgcacgctggtattgttaatgctggtggcgttattcttacacgcttttctccggtatttaatgacgaaatagccatttcactgttattaattattgcaagtatttcagtattgttgggttctggaatcagtcttgtgcatgttgattacaagagacaacttgtaggttctacgataagtcaaatgggttttatgttagtacaatgtgcgcttggggcatattctgcggcgatagtacatttaatattgcatggtgtgtttaaagcgacattatttctacaatcgggttctgttgttaaaagatttaacattcctacgcctccatctgttaaaaaatcatatggctggcttgtatttggtcgtctactagctattcttatagcgataatattttggttgaatagtgatagacatgcatatgatgtattaagcgctcttatattagcttggtcgttaatggtgtcatggaatcaattagttgcttttagtcatggactcatcggaagagtcatcggagtatgtatgattattgttgtagcaattgtttatattattacgcatcattatttcttcacgacattaagtaacgttgatattcatattgtttcaccaccactcataagtattattctatcgattgctattatagttttcggcagtatgttaagcatatgggtatcacggcgaagagaatcaaaggcatttgcgaagttatacttgtggcttattaaagtaggagaggctaaaacccaatctatagaaagtcatccatcatatttaaaacgattttaa

SEQ ID NO: 7977 - DNA, 2568 bp, Staphylococcus epidermidis; identical to SEQ ID NO: 4045

SEQ ID NO: 7978 - DNA, 369 bp, Staphylococcus epidermidis; identical to SEQ ID NO: 4044

SEQ ID NO: 7979 - DNA, 249 bp, Staphylococcus epidermidis; identical to SEQ ID NO: 4043

SEQ ID NO: 7980 - DNA, 672 bp, Staphylococcus epidermidis; identical to SEQ ID NO: 4042

SEQ ID NO: 7981 - DNA, 729 bp, Staphylococcus epidermidis; identical to SEQ ID NO: 4041

SEQ ID NO: 7982 - DNA, 243 bp, Staphylococcus epidermidis; identical to SEQ ID NO: 4040

SEQ ID NO: 7983 - DNA, 1329 bp, Staphylococcus epidermidis; identical to SEQ ID NO: 4039

SEQ ID NO: 7984 - DNA, 540 bp, Staphylococcus epidermidis; identical to SEQ ID NO: 4038

SEQ ID NO: 7985 - DNA, 909 bp, Staphylococcus epidermidis
atgattgcatacgatttgataggacaaactccattagttttattagaaagctttagtgacgagaatgttaaaatatacgccaaacttgagcaatttaatcctggtggtagcatcaaagaccgtctagggaagtacttaattgaaaaagcaatagatgaaggacgacttaaagaaggggatacaatagtcgaagcgactgctggtaatacaggcattggacttgctattgcttctaatcggcacaaagtaaaatgtatcatctttgctccagaaggatttgcagaagaaaaaatttcaattatgaaagcattgggtgcagatgttagacgtacccccaaagctgagggaatgactggcgcacagcaagaggcgttggcatacgcaacacgatatgtatatttatatatgaatcaattcgaaactaaagataatcctggggcatatacacaaacacttgccaaacaactcacagatgaactttcacatattgattattttgtggcaggtgttgggtccggtggtacgtttacaggagttgcacaacacttaaaaacgtatgatgtaaaaaattatattgtagaaccagaaggctctgtcttaaatggtggtgtcagtcatcctcatgcaactgaagggattggttctgaaaagtggccatcatttttagaaaaagaattagtagatggtatttttactgttgccgataaagatgcttttaataatgttaaacttgtcgcgaataaagaaggattgttagttggtagttcttcgggagcggcattacaaggagcgttggaattaaaaaaaagcattcaaaatggtgtgattgttaccatctttccagatggaagcgatcgatacatgtccaaacaaatattcaactataaggagagttttaataatgaataa

SEQ ID NO: 7986 - DNA, 1146 bp, Staphylococcus epidermidis; identical to SEQ ID NO: 4036

SEQ ID NO: 7987 - DNA, 1026 bp, Staphylococcus epidermidis; identical to SEQ ID NO: 6946

SEQ ID NO: 7988 - DNA, 660 bp, Staphylococcus epidermidis; identical to SEQ ID NO: 4034

SEQ ID NO: 7989 - DNA, 846 bp, Staphylococcus epidermidis; identical to SEQ ID NO: 4033

SEQ ID NO: 7990 - DNA, 975 bp, Staphylococcus epidermidis; identical to SEQ ID NO: 6949

SEQ ID NO: 7991 - DNA, 1506 bp, Staphylococcus epidermidis
atgatatacacagtaacaaccacccttccattatcccatggtggtagaactcaagctttactcagacgaattaaactgttagatgaagaatttaaaattccaagtaaaattctcaccactaattatcatggtaattatcctagtatttataaaaaatacagacaagaaaacaaagttacagaaaatatacaattcgagaatatgtatgaatggttatcaaatttcaaactttttaaagtcccaaaaacattgattactaggaatccaaaatacattaaaacacctagaaagattaaaggacttattgataagcaaggaaaaaagagtggtcttattcattattataataatgaatgtcatgtgagatctcgaaagtattatggacagtctaatgttcttgaatatgaggacttcatttctcccacatcaggattgaaatatgagcgccatcaatataacttatacggccaacttcatagaaaagaatattattatgatgactcttctttaaaacatagcgacgaattatttgatactgagggctctatgtactgcaagagatatttcaaaactaaaccaaacagcaaaattaatggcgtagaaatatatagaaataaaaaactttataagacctttaaaaatgataaattattagctcagttttattttcagaatagattcaaaaatcaagatatcgtctttaatgatgctcgatttttagataaaccattacttaaacaaacgcaccaaacaaaaaatattcttgttttacatagctcgcatttatcaggggaccaaataaaaaaatcatatcgatttgctttaaatcaatcaaaaaatgtttataagtatattgttctcactcaccaacaaaagcacgatatacagcaacatttccatataagtgacgaccaattccaactagtaccacattttatcgaattagatacggaggtagaacaagattcctcaaacaatcaaaatcgctttatatatataggccgttttagcacagagaaacagattgatcatattattagagcttatcacaagtttttgcaaagtggttaccaaacagaattacatttatttggtagagatgaagataatcaaattccattgatgaatactttgatttcagaattaaaattatcggataaagttaaaatatttaaatataccaatcaacctttacaagaatttaagaattctaaagcctctctacttacaagtcaatatgagggatttggcttaacacttatggaaagtatagaaatggggtgtccagtcctatcttataacgttcgttacggtccaagtgaaattattcaaaacgggataaatggctatctcattgaaaaaaatgatattgatagtttatcaaaacatatgattaacatcattgagcacccactacaaaaagtgaaaaataaagacactttaaaatataacgccgcagtgaataattacaaacaacttatgcaaagcttagacttattaaaatag

SEQ ID NO: 7992 - DNA, 279 bp, Staphylococcus epidermidis; identical to SEQ ID NO: 6951

SEQ ID NO: 7993 - DNA, 387 bp, Staphylococcus epidermidis; identical to SEQ ID NO: 4029

SEQ ID NO: 7994 - DNA, 120 bp, Staphylococcus epidermidis; identical to SEQ ID NO: 6953

SEQ ID NO: 7995 - DNA, 786 bp, Staphylococcus epidermidis; identical to SEQ ID NO: 6954

SEQ ID NO: 7996 - DNA, 1002 bp, Staphylococcus epidermidis
atgcctataggacaaatcactcaaattactgatatccaatcacaaaaggtaacagacgagcacaaaaataaagatattaagtacaaagagaagataacattcaagattctaaatggtgaattcaaggggcaaacaacgacgattccccaccaatatgtgaaatctcaagctgattcagaatcattttccaaaaatgacaaggttcttttacatatttctaaaaatcctaaagacgcaactattatagagaaaaaacgagatactattgttgtcataataaccggcttatttttacttactgttttagttgttggaaaaaaagtaggacttcaatctatattatctcttatcgttaataccattgccgttatgggagctattttaatacatgatcaatatggggctataagtttattctttttgatgacttgtgctattatcatttccacttctttcactttactacttgtaacaggttggcatagccgaaccttaattactattgtaagtacgctgattggtacgttcttatgtgttggaattaccgaagtcatcatcaaatttaccgggggaaatggaataaaatacgaaacaatcactttccttactctccctcctaaggatgtctttctagcttccgtactaataggtacacttggagcagtgatggatgtttctattactattgcaagtgggatgtacgaaattttaaaacgtagccctcaaatttccatgaaacgttgggctcttgccggaagacatatcggtcaggatataatgggaacaatgactaatatacttctcttttcatatctatctggtagcttacctatgtttctaatttatttaaaaaatgctaacactattacttatactatttcgatgaattggtcattagaagttgctcgagcattaactggtgggataggtatcgttttaactattcctataacaattgctttaatggaactatggtttaaactgcgaggtgttaatcaatga

SEQ ID NO: 7997 - DNA, 882 bp, Staphylococcus epidermidis; identical to SEQ ID NO: 6956

SEQ ID NO: 7998 - DNA, 4497 bp, Staphylococcus epidermidis
atgtacaatgagaaattaaaaaagggactatacgattatcgtgaagagcatgatgcgtgtggtattggattttatgccaatatggataataaaagatctcacgatattatagaaaaatctttagaaatgttaagacggttagatcatcgtggtggagtaggtgccgatggtattactggtgatggtgcaggaattatgacggagataccataccaattgttcgaacaattaacagaattcaaagttcccggcgaaggatattatgccgtgggattatttttttctaaagagaaagttagagattcaattcacgaagagatgtttaatcaatattttgaaagtgaaggttttaaagtcattggatatagagatgtgccagtagatactcgcgctattgctcaacatgttgcagatactatgccttatattcaacaagtatttgttgacatcacaggtgtaaaagaagttgaaaaacgattgtttttagcaagaaagcaaattgaaaaatatagtgaaacacaatccatagatttatattttacaagtctctctcatagaacgattgtttataaaggttggttacgttcggatcaaattaaaggcttatatttagacctacaaaatgaggcatatcaatcaaaattaggacttgtacactcccgctttagtactaatacatttccaagttggaaacgtgcacatcccaatcgcatgcttatgcacaatggtgaaattaataccattaagggtaacgtaaactggatgcgagcacgccaaaataaactagttgaaacattatttgaagatgagaaagataaggtgcattttattgttgatgaagatggtagtgactcatcaatagttgataatgcgttagagttcttatcattagcaatggagcctgaaaaagcagcgatgttattaattccagagccatggttatacaatgaatctaacgataaaaaagttcgctctttctatgaattttatagttatttaatggagccatgggatggaccaactatgatttccttttgcaatggagataagataggtgcattgactgatagaaatggattaagacctgggcgttatacaataactaaagacaattttattgttttttcttccgaagtaggtgtcattgatgttccagaagaaaatgtagcatttaaaggacaacttaatcctggaaagttattacttgtagactttttgcaaaataaggttgtagaaaataatgagctaaaaactaatattgctaatgagttgccctacgaacaatggctaaaagattataaaaataaaaatgatttagataatatttattaccaatcttccgactgggatgatcaaacactcttccgcttacagaaacaatttgcttacactaaagaagatatcaataaatatatgacagatttagtcatcaataaaaaagatcccatcggagcgatgggatatgatgcacctattgcagttcttaatgataagcctgagtcactatttaattattttaaacaattatttgcacaagttaccaatccacccatcgatgcttatcgagaaaagattgtaactagtgaactttcatatttaggttcagaagggaacctcttatgtcctgatgaatcagttttagaaagaattcaattaaaaaaaccagttttaaatgaagcgcaattatcatcaatcgatcattcgtattttaatgtaacgtatttatctacactttatacaggtgatttggaaagtagcttaaatgaactagggaaccgagcaatacaggctgtacatgaaggtgcgaaaattttggtgttagacgatacgtctttaactcacgaaaatagttatgcaatgccaattttattagcgttaagtcacgtgcatcaattattaattcgagaaggattaagaatggagaccagcctcattgcgcagtccggtgaaacacgagaagttcatcacgttgcatgtttacttggttatggtgcaaacgctgtagttccatatttagcgcaacgaacgattgaacaattaacgcgtcaaggtcaactttcaggaactgtcgctgaaaatgttgctacgtataccaatgtattgtcagaaggcgttattaaagtgatggctaaaatgggcatttctactgtacaaagttatcaaggagcacagatatttgaagcggtaggtttatcgaatagcgtcattgaaaaatattttacaggtacacagtcaaaattatctggtataagtattgaacaaatagacaaagagaataaagcgagacaaagtgatgattctgattatcttgaatccggaagtgtattccaatggagacagcaaggtcagcatcatgcatttaatcctcgtacgatttttttattgcagcatgcatgtagagaaaatgattacgagttatttaaaaaattctccaaaactgtaaatttaaaacgtacggatcatattagacatttattagaattcaagacacgccaatctattgatattagtcgtgttgaaccagcaagtgaaatcgtaaaacgttttaatacaggagcaatgagttacggctctatctcagcagaggcacatgagacgttggctcaagctatgaatcaaattggaggtaaaagtaatagtggagaaggtggagaagattcttcacgttacgaaattcaaaaggatggaagtaataagataagtgcgattaagcaagttgcatcaggtcgttttggggtgacgagtgattacttgcaacatgcaaaagaaattcaaattaaagtcgcacaaggcgctaaaccaggggaaggtggacaactaccaggttcaaaagtatatccatggattgctgagactagaggttcgacaccaggtataggattaatttcaccaccaccacaccatgatatttattcaattgaggacttagcacagctcattcatgatttaaaaaatgcaaatagaagagctgatattgcagttaagcttgtatcaaaaactggcgttggaactatagcttcaggggtagctaaagctttcgccgataaaattgttataagtggttatgatggaggtacaggtgcatcgcctaaaacaagtattcaacatgcaggtttgccatgggagataggccttgccgaaacacatcaaacacttaaattaaatgatttgcgtagtcgcgtaaaattagaaacggatggtaagttactgacgggtaaagatgtagcttatgcttgtgcgcttggtgcagaagaatttggtttcgcaacagcaccacttgttgttttggggtgtattatgatgagggtttgtcataacgatacgtgtccagtaggggttgcaacacaaaacaaagatttaagagctttgtttagaggtaaggcacagcatgtagttaactttatgtattttatagctgaagaattacgtgaaattttggcttcacttggtttagaaacagtagaagagttagtaggaagaacagatcttcttcaacgttcgacgcaattgaaaccaaatagtaaagcagcttcgcttcaaatagaacgtttaatagaacaatttgacggggttaatacgaaagagatatcacaaaaccatcatcttgatgaaggattcgatttgaattatctgtacccagacgcacgctatagtattgaaaacgggcactcttttaccggaaattatgttgttaataatgaacagcgagatgtaggtgtaattacaggtagtgcgatagctaaacaatatggagaagaaggattacctgaagatacgatacttgcttacactgaaggtcatgcaggtcaaagcttagctgcatatgcaccacgcggattaacaatccatcataccggtgatgctaatgactacgtaggtaaaggattgtccggtggaactgtcatcgtaaatgctccaaatagtcaacgtgaaaatgaaattatagcaggaaatgtaaacttttacggggcttctagaggtaaagcgtttatcaatggtaaagctggtgagcgtttctgtatcagaaatagtggtgcagatgttgtagtagaaggtattggtgatcatggacttgaatatatgacagggggacatgtcattatcttaggagatgttggaaagaactttggccaaggcatgagcgggggcgtaagttatattttcccttctgacgtggagaaatttaaaaaggttaatgcgcttgaaactttagaattcagtagcatacgttttgatgaggaaaaatctcttatcaaagacatgcttgaagcacattttaagcatacacgtagtaacaaagcacgccaattacttgaccaatttgacaatattgaaaagttagcaattaaagttattccgaaagattacaaattaatgatgcaaaaaattgatttgaaaaaacgtcaaatggaacgtgaagatgaagcaacactggcagcgttttatgatgacagagaaacaattgaacaagagctacagccagcagtcatttattaa

SEQ ID NO: 7999 - DNA, 1464 bp, Staphylococcus epidermidis; identical to SEQ ID NO: 6958

SEQ ID NO: 8000 - DNA, 822 bp, Staphylococcus epidermidis; identical to SEQ ID NO: 6959

SEQ ID NO: 8001 - DNA, 996 bp, Staphylococcus epidermidis; identical to SEQ ID NO: 6960

SEQ ID NO: 8002 - DNA, 531 bp, Staphylococcus epidermidis; identical to SEQ ID NO: 6961

SEQ ID NO: 8003 - DNA, 1707 bp, Staphylococcus epidermidis
gtggattaccaagctttgtatcgtatgtatagaccgcaaagttttgatgatgtggttggacaaacgcatgtaactaaaacgctgcgtaatgcaatttcaaaaggtaaacaatcccatgcatatatttttagtggtccgagaggtacgggtaaaactagtattgcaaaggtttttgccaaagctattaattgtcttaatagtgacgatggtgaaccttgtaatgaatgtgcgatttgtaaaggaatcacacaaggtacgaataacgatgtaattgaaattgatgctgcaagtaataacggtgtagatgaaataaggaatattagagataaagttaagtacgcacctagtgaatctaagtataaagtatatattattgatgaggttcatatgttaactactggtgctttcaatgctttgcttaaaacattagaagaaccaccagcgcatgctatatttatcttggcaacaacagaaccacataaaattccacccactattatttcgagagcgcaacgatttgactttaaagcaattagcagtgaccaaattatagatagacttaagtatgtagctaattctcaatctttggattacgatgacgcagcattagaatttattgctaaagcatcagaaggtggtatgcgagatgcattaagcattatggatcaagcaatagcgtttggagacgaacgacttactttacaagatgctttaaatgttacaggtagtgttgatgaagcggcattaaatgagttatttaatgacattgtaaaaagtgatgttaaagccgcatttaatagatatcatcattttatttcagaaggtaaagaagtcaacagactcattaatgatatgatttactttgttagagatacaattatgaataaaacgtctaacgaatccgttcattttgaatcacttattcatttcgacttagatatgttatacaggatgatagatatcatcaatgatacactagtatccattaggttcagtgtaaatcaaagtgttcattttgaagtgttgctagttaaacttgcagaaatgattaagacacagcctcaaactgtacaaaatgtagcaacagcatcggtagctaatgaaccagataatgagatgttattacaacgtttagaacaacttgaaaatgagcttaaaaccttaaaagaacaagggatcaaaactaataaagttagtcaacaacctaagaaaccaacacgtacgattcaacgatctaaaaatacgttttctatgcaacaaatagcgaaagtattagacaaagcaaacaaagatgatatcaaattgttgaagaaccattggcaagaagtgattgatcatgcaaaaagtaatgataaaaagtctttagtaagtttgctactgaattcagaaccagtagcagctagtgaagatcatgtgttagttaaatttgatgaagaaattcattgtgaaatagtaaataaagatgatgaaaagagaaacaatattgaaagtgtagtttgtaatatagttaataaaactgtcaaagtagttggagtgccggctgaccaatggctgagagtgagagcagagtacttacaaaatcgtaacaccaatgaaacacatcaaagcgaaaaacaaagctcacaacagtctcaacaaatagatattgctcaaaaagctaaagacttatttggtgaggaaactgtacacttagttgatgaagactga

SEQ ID NO: 8004 - DNA, 318 bp, Staphylococcus epidermidis; identical to SEQ ID NO: 6963

SEQ ID NO: 8005 - DNA, 597 bp, Staphylococcus epidermidis
atgcattatccagaacctatatcaaagcttatcgatagttttatgaaactgccaggcattggaccaaagacggctcaacgtctggcttttcatactttagatatgaaagaagacgatgttgttaagtttgctaaagcactagttgatgttaaaagagaacttacctattgtagtgtttgtgggcatattacagaaaatgatccttgttatatatgtgaagataaacagcgagatcgttctgtcatatgtgtagttgaagatgacaaggatgtcatagcaatggaaaaaatgcgtgaatataaaggtttatatcacgtgcttcatggttcgatttcaccaatggatggtattgggcctgaagacatcaatatacctgcattagttgaacgcctcaaaaacgatgaggtgaaagagcttatattagctatgaatcctaacctagaaggcgagtctactgcaatgtatatatctaggttggttaaaccaattgggattaaagtcacaagactggcacaaggtttatctgtaggcggcgatttagaatatgctgatgaagtgactttatctaaagcaattgcaggtagaacggaaatgtaa

SEQ ID NO: 8006 - DNA, 723 bp, Staphylococcus epidermidis; identical to SEQ ID NO: 4334

SEQ ID NO: 8007 - DNA, 981 bp, Staphylococcus epidermidis
atggcaatcaatcagcaaggtcagaaaattttagcgcaacatgcaaacaaatttgataaacatcaatgtcctcactgtaagtctgaggtgatactcaaacaagggatgactttaatagctcactttgcgcataaaacacgttttaatcaccactgttcaaagtcagaatcagttgaacattatgaagcaaagttatatttagcaagaatttataaagcattgaattttaacgtggaaattgaaccttattacaaagaagttttgcaatatccagatattgtgatcaatcaagaaaatgcaattgaagttcaattttctaaaataagtatcagtaaaattattcgccgaacaactggtttaaagcgaataggtttgaatgtgatttggattattaaagatgttcctttgaaatataaatacgttaaattatcaccatttcaaagtgcttttattcatccaattaatagaacattagtaacatgggattccaaaaagtttgtattaatattatatagtcaacttcaacatgtaggcggtaaaaattttgttgctcaaagaaaagttttaaaatttgaagatataataaatatgacttttcaatcaaataatgttcccaattttaggttatctgcttctaatatacaacgttatataaactattgtagaaagcgtcacagtgttttagaacctacactcagtgccatgtatcaattaaatatgtatgattctgatgtaatttctaaattaggatatgttgtaccacatcaaatatatttaataacgcatccaatagaatggcaattaaaatatttgttgctaagaagaacattaaatgacaacgaattatgtaaacaacttcttagtcaagtgaagtttagggtgtttgcaacgtttcaatacgacaaacgtcaaatattaagcactattttacgtgaatttgattatttatatgaacacgaaagcttaaacgtgcaaaagtag

SEQ ID NO: 8008 - DNA, 1809 bp, Staphylococcus epidermidis
atgagtcaacaattaacaagagaagaacaggaacgtaaatatcctgaatatacatgggatttaacaactatttttaaaagtgatgaagcatttgaagaagcttttaaaagtattgaagctaaaataggtgaagaagaaaaatttaaaggtcatcttggtgaaagtgctgaaacattatatgaagcgctaagtcttgaagacgagttaggtacaaaattagaaaaggtatatgtatacgcacatttaaaacaagatcaagatactgcaaatgataaatataccggtttagaagcgcgtgcacatcaacttgttattaaatatagctctgcatggagttttttagtacctgaaattttacaactagatgaagctactattcaatcttttatcgattctaatgatgatttaaaacgatatgaattcgatttgaaattgattaatgagaaacgtccacatatattagatgcgaatacagaaaagttattaacagaagcacaagacgcactttcaacgccttctaatgtatatggaatgttcagcaatgcagatttagaatttgaagatgctatagataaagatggtcaagcttatcctttaacacaaggtacatttatcaagtatttagagtctgatgatcgtgagttaagagcttctgcttttagaaatgtttataaagcatacggtgcgcataataacacgctaggtgctactttagctggtgaggttaagaaaaatgtatttaatgctagaactcatcattatcgttcagcacgtgaaagagctttaagtaataatcatattccagaagctgtttacgataacttaatcaaaacggtccataaatacttacctttattacacagatacacgaagcttagacaagagttactaggtttagacgatttaaaaatgtatgatctttatacacctcttgttaaagatgtcaaatttgaaatgccatatgaagaggcaaaatcctggatgttaaaagcacttgagccaatgggagaagaatacttaaacgtggttaaggaaggtctagataaccgttgggtcgatgtatatgaaaataaaggtaaacgttcaggcggatattcatccggtggacatttaactaatcctttcattttacttaactggtcagacactgtttctgatttatatactttagtacatgaatttggtcactctgcacatagttactttagtagacagaatcaaccatcaaatttaagcgattatacaatctttgtcgctgaggtagcatcaacttgtaatgaggctttacttagtgactacatggacaaacatttagatgatgaacgacgtctattgttacttaaccaagaattagaacgatttagagcaacactattccgtcaaacaatgtttgctgaatttgaacataaaatacatcaaatagaagaagctggggagccgttaacgccaaatcgtatgaatgaagaatatgctaaactgaacaaactatattttggtgaagcagtagaaactgacgatgatattagtaaagaatggtcacgtattcctcatttctatatgaattattatgtatatcaatacgcaactggttatagtgcagctcaaagtttaagtcatcaaattttaactgagggtcaacctgctgttgaacgatatatcaatgaattcttaaaaaagggtagctcaaactatccgattgaaattttaaaaaatgcaggtgttgacatgacaacacctcaaccaatagaggaagcttgtgaagtattcgaacaaaaattagatgcttttgaaaagttaatgaaagcttag

SEQ ID NO: 8009 - DNA, 798 bp, Staphylococcus epidermidis
atggctgaagaattaagaatcatggagaataagagtcgtgaagatactaatctatcacctgttagcaaaatagaaatctattctttttttgatccttttagcaaagattgttttaaattatctgcaatcttatcaaaattaagaattgaatataataaatatataaaggtaagacatattttaaacccttctttaaaggtattaactaagtgtcaagctcaaagtacttcagattttgacaatattgcacttgcctataaagccgctgaacttcaaggtcgtatcagagcagaaagatttatacatttaatgcaaaatgaaatcattccaaaacgtgatattattaccgaagatatgatttctgattgtattaataatgccggcattgactatcaagtttttaaagaagacttgcaaaagtacaagttgactgacagcttgaaagttgatcttcacattgcaagagaaatggaaatagaacaagctccctcacttgtttttttcagcgaaaatgttcatgaagaaggtttaaaagtcgaaggattatatccttatcatatttatacttacattattaatgagttaatgggacaacctatagagaaaaatcttcctccaaaattagaatactacattcaaaagaaacaactagtaacaatggaagaacttttaacgatctatgaatggcctgaaaaattgctaaataaagaattaaagaaactcacacttcaacaaaaagttgaaaagttgcaatatccagagggagaattttggaaatctaaaatgcctcagtgttaa

SEQ ID NO: 8010 - DNA, 384 bp, Staphylococcus epidermidis; identical to SEQ ID NO: 5212

SEQ ID NO: 8011 - DNA, 591 bp, Staphylococcus epidermidis; identical to SEQ ID NO: 4329

SEQ ID NO: 8012 - DNA, 348 bp, Staphylococcus epidermidis; identical to SEQ ID NO: 4328

SEQ ID NO: 8013 - DNA, 636 bp, Staphylococcus epidermidis; identical to SEQ ID NO: 4327

SEQ ID NO: 8014 - DNA, 810 bp, Staphylococcus epidermidis; identical to SEQ ID NO: 4326

SEQ ID NO: 8015 - DNA, 855 bp, Staphylococcus epidermidis; identical to SEQ ID NO: 4325

SEQ ID NO: 8016 - DNA, 1386 bp, Staphylococcus epidermidis; identical to SEQ ID NO: 4324

SEQ ID NO: 8017 - DNA, 1845 bp, Staphylococcus epidermidis
atggaattcttatctttagttatagtcgtcgtagctgcatttatgactccgatcattgtgcatcgttttaatataaactttcttcctgttgttgtagctgaaatattgatggggatagtgataggtcactcttttctcaatttagtggaaagagatgcattccttaatattttatctacgcttgggtttatctttttaatgtttttaagtggtctagaaattgactttaatgcatttaaaaaggattcacgtccaagacaaggagaagataaacatgaaaaggatgtacctgggcatcttaagctggcactgacagtatttgcatttattatgatgatttcggttgttttagcttttgcatttaaatggttaggattagttaatgatgtccttttaatggtgatcatcatttcaacaatttctttaggagttgtagtaccaacccttcaagaaatgaacattatgcgtacaacgataggacaatttattttactagtagctgtattagcagatttatttaccatgattttactaactgtttatggtgctatttatggtgaaggtggtagtacaatatggcttacaggtattatagtcgtatttacagttgtcttttatgtaatcggtgtgttatttaaacgtatgtccttcttacaaaagttaatggatggtacaacgcaaataggtataagagcagtatttgcacttattattttattagtagcacttgctgaaggtgttggtgctgaatacatattaggtgcatttcttgccggtgtcgttgtttctttacttaaacctaatgaagagatggtcgaaaaattagattcctttggttatggtttctttattccaattttctttatcatggtaggtgtcgatttagatatcccaagtttaattaaagaaccatcgttgttacttattatacctgtactcattttttcatttattatttcaaaattgataccagtattttacattagacgctggtttgacactaaaactaccattgcatctgctttcttacttacatcaactttatcacttgttatagctgcggctaaaattgctgaaaaattaaaagcgatttctccggaaacttcaggcattttaattcttagtgctgtgattacatgtgtcttcgtacccgtgatatttaagaaaatgttcccaattcctaatgaagtgggacgccgcatagaagtaagtatgattggaaagaatcaattaactattccaatagcacaaaatttaacttctcaattatatgatatttctttatactatcgaaaagatttgagtgatagtagaaagctctctgacgatattactatgatagaaatagcagattacgaagaagatttattagaacgcttgggacttttcgagcgagatattgttgtatgttctacaaatgatgaccatataaataaaagcgttgcgttaatggctaaaaaacatggtgttaaacgtgttatatgtcgactcgaaagcacaaacgaagatccgacattgaaacatcaaggtatagaggcgtttagtaattatttaagtaataaaatcttactaaaaagtttaatagaaacacctaatatgctgaatttattaagtaatgtagaaacatctctatatgaaattcaaatgttaaattatcagtatgaaaatattcaattacgtaatttcccatttggtggcgatattatttttgttcgtattataagagataacgattcaatcgtacctcatggtgatacacagttacgatataaagatcgtttgattgtgacgggaactaaagaatatgtagatgaattaaagcaagaattggaattttattattaa

SEQ ID NO: 8018 - DNA, 120 bp, Staphylococcus epidermidis
atgatacttttttggagacaatcatatctacttaaaatacttttcattataatttcaacatcggaagagttgccttttgatgttaaaaaaagtattaagcaactgactaaaagtgcttaa

SEQ ID NO: 8019 - DNA, 624 bp, Staphylococcus epidermidis
atggattatgtatacacaatttataaaaatcctagatataacatcattcaaaaagataatcgctatttaatggtcgatttagaacaaaattggtattcatatttatgtccaatgctgaattggtttatacctattaaattcacagaattaacttatcaagaattcaataatataaacatatttcataatggaggacaaaagagtcaaggtatgctagcaggtggtattggtgtcactatcagtgtgttattaagaagtcttgtgggttatatagatattaatattagtcgaatttggatagtttttatgtttttaattggatttgttgctgtgatcacacttcgtttatctataagaaagaagttaaatcatccagcatttaataaaaagagtaaacaaaaagtaatattgataccatcatttaaaaatatgatattggtggtgttttgctattttatgatgctgtttttctcaattgcaccttttcaaatgatttttgaggaaaagaaaaacatcttaggatatatactttgggtaggtgtattatttatatttactactttgaatatggcttcaattactgatagaaaagtacatgccaaaattaaaaatataagaagatag

SEQ ID NO: 8020 - DNA, 264 bp, Staphylococcus epidermidis; identical to SEQ ID NO: 4321

SEQ ID NO: 8021 - DNA, 204 bp, Staphylococcus epidermidis; identical to SEQ ID NO: 4320

SEQ ID NO: 8022 - DNA, 306 bp, Staphylococcus epidermidis; identical to SEQ ID NO: 5201

SEQ ID NO: 8023 - DNA, 195 bp, Staphylococcus epidermidis; identical to SEQ ID NO: 5200

SEQ ID NO: 8024 - DNA, 180 bp, Staphylococcus epidermidis; identical to SEQ ID NO: 4318

SEQ ID NO: 8025 - DNA, 378 bp, Staphylococcus epidermidis
atgcaattttattatagtaattgtgaacagaatgcatcaaacttattagtcatcaacgtacaacctaatgaaggattttctttatgtgtgaatggtaagaaaagtaatcaaaataatgaaatgcaaaaagtgaagcttccttatactatgccgattaaagataaaatgaacacagttgatgcatatgaaaatcttatttacgatacattaattggagaacaaacaaaatttacgcattgggaagaattaaaaattcttggaaatttattgatgatattgaaaatgtatggaaacaagaatagccacagtttcctaattatgcctttggatgctatgggcctaaagaaagtgaaaaattacttagtgaagacggattga

SEQ ID NO: 8026 - DNA, 2259 bp, Staphylococcus epidermidis
atggattttattaatattacaggtgcttcacaaaataacttgaaaaacatagatgtaaatatcccaaaacacttagtaacggtatttacaggtcgttctggttcagggaaatcatctttagtgtttaatactgttgctgcggagtctgaacagctactaaatgaaagttattctagttatattcaatttcatttaaatcaacaacccagaccgaaagtaaagaaaattaaaaatcttcctgtagcaatgacgattaatcagaaaagattcaatgggaattctcgctccacggtaggaacagtttcagatatatatgcttctgttagattactgtggtctagaataggcgaaccgtttgttggttattcagatgcatattccttcaatagtcctaagggcatgtgtaaaacttgtgagggattaggatatattgaagacattaacttagatgaattgctagattgggataagtctttaaatgaaggtgcaatagactttccttcttttggaccagacaaagagcgtggtaaagcctatcgagatagtggtttatttgataataataaaaaattgaaagattatacaaaagatgaattagaattgtttttatatcaagagccaatgacattaaaaaatcctcctaaagaatggagaaagtcagctaaatatgtaggactaatacctagattcagtagaatatttttaggtgataaagaatttaataagaaacgctacgccaaacatcttaaaaatgtagtaaataataaaatctgtccaacatgtaaaggtcaacgtctaaactcgaaaatattaagttctaaaattatgagtaaaaatatttctgatttcacacaaatgacaattaaggaaaatttagagtttcttaataaattagaggatccaacagccaaatatattattgatcctctcaaaaagcagttagaagcactagaatatattggattaagttatttaacgcttaaccgtgtaacaacgacattatcaggcggtgaagcgcaacggcttaaattaatacgtcatttaaatagttctttatcggatttagtttacattatagatgaaccaagtgttggcttgcatccggaagatatagctaaaatcaatgaaattttaaaatcattaaaagaaaaaggtaatactgtgttaattgttgaacatgatcccgatgtcattaaagaaggagactatatcatagatatggggccaggttcaggaaaaaacggcggtgaaatcacatttgaaggaacatataatgaattactatcttcaaatacttcgacaggtaacgcattacgtaacaaacataatttaaaagagaatattcgtgaagctaaccacttttataatatcggtcctgtgacacaaaacaatttaaataacgtaaaaacgtctatacctaaacacgtattaacagtcttaacaggtgttgctggttcaggtaagagtacccttgttaaagcaggttttgaaaataatgaccataccatctttattgatcaaaaagcagttcaaggatctaatagatctaatctattaacgtatttaggtgtttttgatagtgtaagaagctatttcagtaaagaaacaggcttaaataaagctatgtttagttataattcaaaaggtgcctgtccaaattgtggtggaaagggctatattaaaacggaacttgcttttatgggtgatttttcacagacatgtgaagtttgtcatggcaaacgttataaacaagaagtattagatgctaccatagacgggtattcaattgccgatgttctcaatttgacggttgacgaaggtatcattttctttgataaaaagaatgatattaagtcaaaattacaatctgtaagtaagacaggtttgaattatatgtcactaggacaacctttatccactttgtctggtggagagattcaacgcgtgaaactaggacaacatttagatgaagagataaagaatagtatttttatttttgacgaaccaactacaggcctacatgaatcggatatccctatattgatggagtgttttgatgatttaattgatcaaaacaatactgttattttgattgaacataatttatcgattatgtgtgaagcagattggatcatcgatgtcggcccaggcccagggttggatggcggaaaggtccaatttagtggaacacctaaaaacttcattgatagttcagaaacattgacatctaaacacttgaaacgctatatcaagcagtaa

SEQ ID NO: 8027 - DNA, 129 bp, Staphylococcus epidermidis; identical to SEQ ID NO: 4315

SEQ ID NO: 8028 - DNA, 201 bp, Staphylococcus epidermidis; identical to SEQ ID NO: 4314

SEQ ID NO: 8029 - DNA, 216 bp, Staphylococcus epidermidis
gtgagaaagggagatagatttgttgtagagtctattgaccgtttgggacggaattatgatgaagtgattcataccgttaattatttaaaagacaaagaggttcaattgatgattaccagcttccctaggatggatgaagtcattggcaagccattactgtatatagaaagccatgcgctatgtgtatggttcagaaaaggttttaccgttatctaa

SEQ ID NO: 8030 - DNA, 372 bp, Staphylococcus epidermidis
atgtcatctgacacaaacggtttagcacatacaaaatggaattgtaagtatcacatagtctttgcaccaaaatatagaagacaagtgatatatggaaaaatcaaaagagatattggagtgattttacgtcaactatgtgaaagaaaaggcgtagaaataatagaagcagaagcatgtaaatacccagttggtgttgttgaagatcaaatatactatttcaacgaagagaatattgataacgttatatttgagggctattctgatcaagatgaaacaagatttcaagaattatttaaagatatgatgggtaatttgtatgaaggtattaaacgtgggactgttcaacaaaaagatagttacggattgatttaa

SEQ ID NO: 8031 - DNA, 771 bp, Staphylococcus epidermidis
atgttaaatctagaaaataaaacctacgtcattatgggtattgcgaataaacgtagtatcgcatttggcgtcgctaaagtattagatcgattaggtgctaaactggtatttacatatcgtaaagaacgcagtcgtaaagaattagagaaattattagaacaattaaatcaatctgaacattatctctatgaaattgatgtccagaatgatgaggatatcattaatggttttgctcaaatcggaaaagatgtaggccagattgatggtgtttatcattcaatcgcatttgccaatatggaagatttacgaggtcgattttcagaaacatctcgcgaaggtttcctacttgcacaagaaattagttcatattcacttactctcgtagctcatgaagccaaaaaacttatgcctgaaggtggaagtattgttgcgacgacttatattggtggtgaggcagcagttcaaaactataatgttatgggtgtagctaaagcaagtttagaggcgaatgttaaatatttagctttagacttaggtgaagataatattcgtgtcaacgctatttctgcagggccaattcgtactttaagtgctaaaggtgtaggtggatttaatacaattcttaaagaaattgaagcgagagcgccgttaaaacgcaacgttgatcaagaagaagtaggtaagacggctgcgtatttattaagtgatctttcaagtggtgtaactggagagaacatccacgttgatggtggattccacgcaattaaataa

SEQ ID NO: 8032 - DNA, 1086 bp, Staphylococcus epidermidis
atgttcaataaggtttggtttagaacaggaatattttttattatgctgttcatactcatcaaactatttatggaagtacatgaagtatttgctccaatagctactatcattggttcagtctttcttccatttttaattagtggatttctcttttacatatgtttaccttttcaaaacatattagaaaagtggggctttccacgttgggctagtataacaacaatattcataggattaatagttatcatcgctattgtggtatcatttatagcacctatcattatttccaatattaataacttaattaaacaaacaccatcattacaaaaagaagccgaacaattaattaatttctcgttaagacaaatggataaattaccagatgatgtcacacatcgtattaataaagcggttaaatccatgggagatggcgcaacgtctattttatctaattcagtgtcatatattacgtctttcatctcaactgtatttttattaataatggtgcctttcttcctgatatatatgctaaaagatcatgaaaaatttatcccagcaatcggtaaatttttcaaaggagaacgtaaagtttttgttgtagatttattaaaagacttaaacttcactttaaaatcatatattcaaggtcaagtgacagttagtatcatcttaggtattattttatatataggttatacgattataggattaccatatacacctttattagtattattcgccggcgtagctaacttaataccatttttaggtccatggttatcttttgcaccggcagcgatactaggtattattgatggcccttcaacttttatttgggtatgtgtcgtaacattaatcgcacaacaacttgaaggtaacgtgataactcctaacgtaatgggtaaatcattaagcattcatccattaactattattgttgtcatacttgcagctggagatttgggtggtttcacactcattcttgttgcagttccattatacgctgtaatcaaaacattagtgagcaacatttttaaatatcgtcaacgtattgtcgataaagcaaacagtaatgttaaagattaa

SEQ ID NO: 8033 - DNA, 756 bp, Staphylococcus epidermidis
atgtcggagtttaaagtaggtaagattaataaaaaaataatacatagtgatattttaaatagagatgtaacattatcggtttatttacctgaggattatacaaacttatttaaatatcagttgattttttgctttgatggtttagatttttttagatttggtagaatacaacgcatatatgaacagttacgtgaagaacaatcaatacaacgtgcaattatagtaggattccattacgaagatgttgaaaaacgtagggaagaatttcatccttcaggaagtcgttctaatttaaccattaaagcaatgggaaaagaaattcttccttatatcgatgcgacatttccaacttataaagtaggtaatacaaggttacttattggagatagtttagcaggaagtatcgctttaatgactgcaatgacttacccaactatttttagtcgagttgcgttattgagcccaatgtataatgaaaatattaagaaaaaaattgatacatgtatgaataaaggtcaattgacgatatggcatgccattggtttagaagaagcagattttattttaccaactaatggtaaaagagctaactttttaacacctaaccgcgaattaaatcaactgattaaagaagataatattgaatatttctataaagaatttaacggtggacatcattggaaatcatggaaaccattgctaggagatattctcttacaatttttaggtgatccaataaatggaaaatatgtttaa

SEQ ID NO: 8034 - DNA, 510 bp, Staphylococcus epidermidis
atgattttaggattagcattggttccgtcaaagtcatttcaagatgaggtgaatgcttatcgcaagcgatatgacaatcattatgctcaaataatgcctcatatcacgattaaacctcaatttgaaatcgatgatcatgattttaatttaattaaaaatgaagtgaaaaatcgaatttctagtattaaaccagtagaagtgcatgctacaaaggcatctaatttcgctccagtcagtaatgttatatacttcaaagttgctaaaacagagtcattagagcaattatttaatcaatttaatacagaagatttttacggtatagctgaacatccttttgtacctcattttacaattgcccaaggtctaacaagtcaagaatttgaagatatatatggtcaagtaaaattagcaggggtagaccatagagaaataattgaagaactatcgttacttcaatatagtgaagaagaggacaaatggactattattgaaacttttacattagggtaa

SEQ ID NO: 8035 - DNA, 1212 bp, Staphylococcus epidermidis; identical to SEQ ID NO: 4307

SEQ ID NO: 8036 - DNA, 1176 bp, Staphylococcus epidermidis
atggttactcaaaataaaaagatattgattattactggatcatttggtaacggtcatatgcaagtcacgcaaagtattgtcaaccaattgaatgagatgaatctcaatcatttatcagtcattcaacatgatttgtttatggaagctcatccaattatgacttctatatgtaagaaatggtatatcaatagctttaaatattttagaaatacatataaacgattttattatagtcgccctaatgagctcgataaatgtttttataaatattatggattaaataaactcatcaacttacttattaaagaaaagcctgatctcatattattaacatttccaacacctgtgatgtcagtattgaccgaacaatttaatataaatatccctattgcgacagttatgacagattatcgcatgcataaaaattggattacaccatattcacaaagatattatgtagcaacaaaagatactaaagatgatttcattgaagctggtgttcctgcttcatatattaaagtgacgggcattcctattgctgataaatttgaagaatctattgataaagaagaatggttatcgcaacaacatttagacccttcaaaacctactatattaatgtcagcaggtgcatttggtgtttcaaaaggctttgactatatgattaataatattttagaaaaaagtccaaattcgcaagtggtcatgatttgtggacgtagtaaggaacttaaacgttcattaaaagctaagttcaaagataatccaagtgtaataatattaggatatacaaatcacatgaatgagtggatggcatcaagccaactaatgattacaaaacctggtggtatcacaatttccgaaggacttagtcgttgtattcctatgatttttttaaaccctgcacccggtcaagaacttgaaaatgcatattactttgaaagtaaaggatttggaaaaatagcagacactccaaatgaggcaattgatattgtttctgacttaacaaataacgaagagactttaaaggttatgtcatctaaaatgctagaatcaaaggtaggatattctactagaaagatttgtaaagatttattagatttaataggtcactcatctcaaccggatgaaatctatggaaaggttcctttgtatgcaagattcttcgtcaagtaa

SEQ ID NO: 8037 - DNA, 1485 bp, Staphylococcus epidermidis
ttgaatgcaagtgcgttgttcaaaaaaattagagtaaaaaatgtaattggtacattagatatacaggtggacgatattaccactgactcacgtacagctaaagagggaagtctatttgtagcatctaaaggatatacggtagatagtcataagttttgtcaaaatgtagtagatcaaggttgtggtattgttgttgtcaatagagaactcgaacttaaaggtaatgtgacgcaagtcgttgttcccgatactttacgtgttgcaagtctattggcacatgaattatacgagtttcctagtcatcaactgacgacatatggtgttacggggacgaacggtaagacatcgattgcaactatgattcatttaatttatagaaaattgaataaaaatagtgcatatctaggtacgaatggatttcaagttaatgaaacaaaaacaaaaggtgcgaatacaacaccagaaacagtagcattaacaaaaaagatcaaagaagcagttgatgccaatgcagaagcaatgacgatggaagtttctagtcatggattggccttaggtcgacttagaggcgtagagtttgacgttgctatcttttcaaacttgactcaagatcatttagactttcatggaactatggaagcatatggacatgctaaatcgttattatttagccagttaggtgaagatttgtctaaagaaaaatatgttgtattaaataatgatgatgacttctccgattatttagcaagtgtgacaccctatgaagtatttacatatggtattactcacgaagcacaatttatggctaaaaacattaaagaatcattgcaaggtgtagaatttgaattttgtactccatttggaagttttccagttaaatctccttatgtaggtaggtttaacatttcaaatattatggctgctatgattgcggtttggagtaagggaacaaatttaaatgaaattattaatgctgttactgagcttgaacctgtagaggggcgcttagaagtacttgatccatcacttcctatagatttgattatagattatgcacatacagctgatggtatgaataaactgattgatgctgtacaaccatttgttaaacaaaagctaatctttttagtaggtatggctggggaaagagatttaacgaaaacacctgagatggggagagtagcatgtcgagcagattatgttatttttactccagataatcctgctaacgatgatcctaaaatgttgacagctgaattagctaaaggtgcaacgcataacaattatatagagtttgatgaccgtgcagaaggtattagacacgcgattgatattgctgaaccaggtgatacagttgttttggcctcaaaaggtcgagagccttatcaaattatgcctggtcatgttaaagtcccacatcgcgatgacttaattggcttaaaagcagcatatcaaaaatttggtggtggacctcttgaggattaa

SEQ ID NO: 8038 - DNA, 246 bp, Staphylococcus epidermidis
ttgaggattaaatcacttcagtttcatggaatgatgataaacgtatatcattatcattctaatgatttaatcatgttagctattccagaacttttttggtccattgagttatccaaagagttagatgcaaatcagctatatgaggaattagtgatgcaattattcaatttgttgactgaagttgaagcagatacattggcaagtaatataactgatttgattagaaatgaatccaaaggagaatga

SEQ ID NO: 8039 - DNA, 1563 bp, Staphylococcus epidermidis
atgaatttaaaagaagaaatagagtcaagaaagacatttgccatcatttcacaccccgatgctggtaaaacaactttaactgaaaaattgttgtatttcagtggagcgattcgtgaagctgggacagttaaagggaaaaagacgggtaaatttgcaacaagtgattggatgaaggtagaacaagaacgtggtatctcagttacaagctctgtaatgcaatttgattatgatgattataagataaatattttagatacgcccgggcatgaagatttttcagaggatacgtatcgtacattaatggcagtagatagtgcagttatggttattgactgtgcaaaaggtatagaaccacaaacattaaaattatttaaagtttgtaaaatgcgaggtatccctatttttacattcatcaataaattggatagagtagggaaagagccatttgaattacttgatgaaatagaagaaacacttaatattgacacttatccaatgaattggcctgttggtatgggacaaaatttctttggtattattgatagacactctaaaacgattgaaccatttagagatgaagaaaatttattacatttaaacgaagattacgaacttaaagaagaacacgcgataaaaaatgatagtgcatttgaacaagcaattgaagaaatgatgcttgtcgatgaagcgggtgaagcatttgataatgaagcgttactgaacggtgaattaacacctgttttctttggatcggcattagcaaacttcggcgtacaaaatttcttaaatgcatacgttgatcatgcgccaatgcctaatgcgagacaaactaaagaagaggttgatgttagtccattcgacatagatttttctgggtttatctttaaaattcaagccaatatggatccaaagcatcgtgacagaattgcatttatgcgcgtggtaagtggtgcgtttgaaagaggaatggatgtaaccttacaaagaactaataaaaaacaaaaaataactcgttccacatcatttatggctgatgataaagaaactgttaatcatgctgtagcaggcgatattattggtttgtatgatacaggtaactatcaaataggcgatactttagttggtggtaagcagaaatatagtttccaagagttaccacaatttactccagaaatatttatgaaggtttctgccaaaaatgtaatgaaacaaaagcattttcataaagggattgaacagcttgttcaagaaggtgcaattcaatattataaaacgttgcacacaaatcaaattatcttaggtgctgtgggtcaattacaatttgaggtgtttgaacaccgcatgaataatgaatataatgtagatgtggttatggaaccagttggacgtaaaattgcgcgttggattgaaaatgaagaagatattaaagataatatgaatacttctagatcaattttagtaaaagatagatacgacaattatgtattcctatttgaaaatgaatttgcaacgcgttggtttgaagaaaaattctctgatattaaactgtatagtttattataa

SEQ ID NO: 8040 - DNA, 807 bp, Staphylococcus epidermidis
atggatccgagtttgattttaccttatttatgggtacttttagtacttgtatttttagaaggattattagcagctgataatgcaattgtaatggcggtaatggttaaacatctaccacctaaacaacgtaaaaaagcacttttttatggcctattaggtgcattcatttttagatttattgctttatttttaataagtattattgcaaacttctggtggatacaagcagcaggtgctgtttacttaatctatatgtctattaaaaatttatggcaatttttccatcaatcaaatgaaaaacatcataaagaaacaggagacgaacatcatttcgatgaaacaggcaacgaaaaagaagtaggccctaaatctttttggggaacagtatttaaagttgaattcgctgatatcgcgtttgcaattgattcgatgcttgccgcattagccatagccgttacattaccaaaagttggcatacattttggtggtatggacttaggccaatttattgttatgttccttggtggaatgataggtgtcatcttgatgagatttgcagcaacttggtttgtagaattgttgaataaatatccaggacttgaaggtgctgcgtttgcaattgtaggttgggtaggtattaaacttgttataatggtacttgcacatcctgatattggcgttttaccagaagcatttccacatagtgctttatggcaaacaatcttctgggtagtattagttggcttagttttaataggatggttaacttcagcaattggcaacaagaaaaaaggtaatcaaaaataa

SEQ ID NO: 8041 - DNA, 1758 bp, Staphylococcus epidermidis
gtggataacaataaaaaacaagtcataccacgcagtcaatatcgacgtaaaagacgtgaatactttcataacgtagagcgagaagagcgcataagacgtgagaaaatagagaaggaaaatcaagctaaaagagaacaacatcaaactaaagtcaatgaggaacgtgttaaagataatttgagaaaagcaagaatagagaagctgacacaagaagaaatacatcaacaacgtgatgataaaagttataaacaaaaaactttaaatcaaaataatcaaatgaataaatctaaagacgacgataataaaattggagaagaaagtctacatgatgtgcgagtttcaagtgatacctccactttaccgcatcaaaataagtcaataaaagactatgatgattctggaaacgaaagtaaacaacatactaaattgacttcaaaggaatctatgctaggcgtaaattctaatcatactgagcaagattcaagaagtacacaaccatattcttcaaaacatagctattcacaaccaaaagataaagacaacgataatactcaacaagcgcaatttcttaaaaaagaagacaaacaacgtaacagagccgaaaatataaaaaaagttaatgaatttaaacaattggtggtagctttctttaaagaacactggcctaaaatgttaattattatcggtattatagtattacttttaatattaaatgccatattcactacagttaataaaaatgatcatacaaatgatagtgcatttaacggtacagctaaagatgaaacaacagcgatgaaaattgctgaaaactctgttaagtcagttgtaactgtcgagaatgatttgtctaatgacacgactgtgtctgataacaaaaatgaatctgacaatgagataggatcaggtgtcgtctacaaaaaagtgggcgactctatttatatttttactaatgcacacgttgtcggtgatcaagaaaaacaaaaagtaacatatggtaatgataaatctgtgacaggtaaggtaattggtaaagataaatggtctgatttagcagttgtaaaagctaaagttgctgacgaaaatattaaaccaatgactatgggggattctaataatattaaattggctgaacctattttagttataggcaatcctctaggcacagactttaaaggaagtgtttctcaaggtattgtgtctggactcaatcgtcatgtacctgtggacattgataaaaatgataattatgatgctttgatgaaagcttttcaaattgatgcgcctgtgaacccaggaaattcaggtggtgctgtggtcgatagagacggtagactcataggtatagtttctttaaaaattgatatgcataatgtagaaggaatggcttttgcgatacctattaatgatgtacgtaagattgcgaaagaattagagcataaaggtaaagtgaactaccccaatactgaaatcaaaatcaaaaatgttggtgaccttgacgattctgaacgtaatgcaatcaacttaccagctaaagtgaatcatggtgtattaatcggtgaagtgaaagaaaatggtttaggagacaaagcaggtttaaaaaaaggtgatgtaatagtagaattagatggtaagaagattgaagataacttacgatatagacaagtcatatatagtcattatgatgatcaaaaaacaattactgctaaaatttatcgaaatggtgcggagaaaaatattaaaatcaaattgaaataa

SEQ ID NO: 8042 - DNA, 1359 bp, Staphylococcus epidermidis
atgtcagttttaagtcagctgcttaaaaaatctagccctcaacaagggattatactctattatctatttgccatcgtcgttgcatttttattattaaatttgccatatgttcataaacaaggggttgaggttaatccaattgatacactttttgtagctgtatcaggtattagtgttacaggattatcaccaattactatagtcgacacatactcaacctttggtcaaattatcatacttattattttgaacatcggtggtataggtgttatggctattggaaccatgctttgggttgttttaggcaaacatattggaattagagaacgacaactcattatgttagataataatagagatactatgagtggaacggttaaactgattttagaaattgtaagaacaatttttattattgagtttataggtgcactcttactcgcgttctatttttatcgggataatcctgatttaaaaaacgcattaatgcaaggcatttttgtgtcagtatctgctacgactaacggtggtcttgatattactggtgaatctttagttccctatgcaaaagactattttgtacaaacaatagtaatgttcttaattgtgttaggatctataggctttccagttttgttggagttaaaagcatatataaagaatcgagtaactaattttaggttctcattattcacaaaaataacgacaacaacgtatttattcttatttttattcggcgttattgttgtattaatattagaacatagcaatgtatttaaaggattgagttggcatcaatcattattttatgcattgttccaatcatcaacgaccagaagtgcaggtttgcaaacgatagatgtgtcacatttcagcgacgcaacaaatattgtaatgggattattgatgtttataggatcatctcccagttctgtaggaggtggaatcagaacaacaacatttgctattttaattttgtttgttattaattttaataatactggtgacaaaacaggtattaaaattttcaacagagaagtacatattatggatgtacaaagatcatttgccgtatttactatggcgtcattaattacatttattagcatgattattatatctgccactgaacaaggcaagttgtcctttttacaaattttctttgaagtaatgtctgcgtttggtacatgtggtttaagcttaggtgtgacaagcgatgtcaacgacattaccaaggctgtattaatgatattaatgtttataggtcgtgtaggacttatttcattcattattatgttagctggacgtaaagaacccgaaaaatatagctatcctaaagaacgtatacaaattggatag

SEQ ID NO: 8043 - DNA, 1506 bp, Staphylococcus epidermidis; identical to SEQ ID NO: 4299

SEQ ID NO: 8044 - DNA, 603 bp, Staphylococcus epidermidis; identical to SEQ ID NO: 4298

SEQ ID NO: 8045 - DNA, 186 bp, Staphylococcus epidermidis; identical to SEQ ID NO: 4297

SEQ ID NO: 8046 - DNA, 987 bp, Staphylococcus epidermidis; identical to SEQ ID NO: 4296

SEQ ID NO: 8047 - DNA, 219 bp, Staphylococcus epidermidis; identical to SEQ ID NO: 4295

SEQ ID NO: 8048 - DNA, 576 bp, Staphylococcus epidermidis; identical to SEQ ID NO: 4294

SEQ ID NO: 8049 - DNA, 459 bp, Staphylococcus epidermidis; identical to SEQ ID NO: 5710

SEQ ID NO: 8050 - DNA, 1338 bp, Staphylococcus epidermidis; identical to SEQ ID NO: 5711

SEQ ID NO: 8051 - DNA, 612 bp, Staphylococcus epidermidis; identical to SEQ ID NO: 5712

SEQ ID NO: 8052 - DNA, 315 bp, Staphylococcus epidermidis
atgaaaatgattatagcgatcgttcaagatcaagatagtcaagagctttcagaccaactcgtaaaaaacaatttcagagctacaaagttagcaactactggtggatttttaagagcaggcaatacaactttcttatgtggggttaaggatgaccgtgtcgacgaggttctatctgtcattgataatacttgtggtaatagagaccaacttgtttcaccaataacagcagattcatatattccttatccagttgaagttgaagtaggtggcgcgacagtatttgtaatgccgattgaagcatttcatcaattctag

SEQ ID NO: 8053 - DNA, 927 bp, Staphylococcus epidermidis
atggatgaacaacaacagttagctaacgcatatcattctaacaaattgtcacatgcatatttgtttgagggtgatgatgcacaaacgatgaaacgtgtcgcaatccattttactaaattaattctttgtaataatagtaatcaatgcgaactgaaagttgatacttttaatcatcctgacttttcatatgtgtcttctgatgaaaatacaattaaaaaagaacaaattgaaaaacttgttcatcatatgaaccaactacctattgagggtcaatataaagtatatattattgaggattttgaaaaattaactgttcaaggggaaaatagtatactaaaatttttagaagagccccctgataatacaattgcgatacttttatcaacgaaaccggaacaaatattagacactatacattcaagatgtcagcatgtatattttaagcctattgataagcggcagtttatagagcgtttagtagagatgtcaatagcaagaccggtagcagaaatgctaagtacctatacaactcaaatagaagcagcatcgtcgttaaatgaggaatttgatttagttactttaagaaaatcaatcatcagatggtgtcaattaatattatctaataaagctatggctcttataggtgtcattgagttattaaaacaagctaagaatcgtaaattacaattacttactttatcagccgtcaatggctttttcgaagatataatgcatgcaaagatagaaatggataattattatacatttagtgatttaactgaagaaattgaaaattatgcaaatcaattaacttttaatcaattaatcctcatgtatgatcagattactgaagcgcataaaaagttaaatcaaaatgttaatccaacacttgtttttgaacaaatagtaataaaaggtgtgatttaa

SEQ ID NO: 8054 - DNA, 804 bp, Staphylococcus epidermidis; identical to SEQ ID NO: 2899

SEQ ID NO: 8055 - DNA, 348 bp, Staphylococcus epidermidis; identical to SEQ ID NO: 2900

SEQ ID NO: 8056 - DNA, 726 bp, Staphylococcus epidermidis
atgttagaagataatgaacgcgttgaccatttaataaaagaaggatatgagattatacaaaatgatgaagtattctctttttctactgatgccctattgttagggtatttaaccgaagttcgcaaaaatgataaagttatggatttatgctccggcaatggtgttattccattattattagctgctaaatcaactcaacctattgaaggaatagaaatacaagagcaactagtgagtatggcacgtcgcagttttaaattgaatgatttgaacgatagactaactatgcaccatatggatttaaaagatgtatatcaaacatttcaacctgctcaatatacattagtgacttgtaatcctccttattttaaaatgaatcaaaatcatcaacatcaaaaagaagcacataaaatagcacgtcacgaaataatgtgtaatcttaaagattgtattgaagctgcaagacatttacttaaagagggtggtcgttttattatggttcatcgagcggaaaggctaatggatgtcttaaccgaattaagacatggtaaaattgagcctaaagcactgacgttagtgtatagtaaacatgataagcctgcacaaacaattgttgtggaaggaagaaaaggtggtaacaaaggtttagatatacgtaatccattatacatatataatgaggatggatcatatagcgatgagatgaaaggtgtttattatggataa

SEQ ID NO: 8057 - DNA, 249 bp, Staphylococcus epidermidis; identical to SEQ ID NO: 2902

SEQ ID NO: 8058 - DNA, 840 bp, Staphylococcus epidermidis; identical to SEQ ID NO: 2903

SEQ ID NO: 8059 - DNA, 1971 bp, Staphylococcus epidermidis; identical to SEQ ID NO: 2904

SEQ ID NO: 8060 - DNA, 771 bp, Staphylococcus epidermidis; identical to SEQ ID NO: 5721

SEQ ID NO: 8061 - DNA, 546 bp, Staphylococcus epidermidis; identical to SEQ ID NO: 2906

SEQ ID NO: 8062 - DNA, 891 bp, Staphylococcus epidermidis; identical to SEQ ID NO: 2907

SEQ ID NO: 8063 - DNA, 264 bp, Staphylococcus epidermidis; identical to SEQ ID NO: 2908

SEQ ID NO: 8064 - DNA, 849 bp, Staphylococcus epidermidis; identical to SEQ ID NO: 2909

SEQ ID NO: 8065 - DNA, 825 bp, Staphylococcus epidermidis
atgagatataaaagaagcgaacgtattgtatttatgacacaatacctcatgaaccacccaaataagttgatacccctcacttattttgtaaagaaatttaaacaagcaaaatcgtcaattagtgaagacgttcaaatcattaaaaatacgtttcaaaatgaaaaattaggaactattattactacagcaggtgctagcggtggagtaacctataagcctatgatgagtaaatcagaggccacagaggttgttgatgaggtgatagagcaattacaagagaaagaccgtttgctacctggaggatatttatttttatccgatttagttggtaatccttctctattaaataaagtaggtaagttaattgctagtatatatatgaacgaagaacttgatgctgttgttaccatagcgactaaagggatatcacttgcgaatgcagtcgcaaacgtattaaatttacctgtagtggttataagaaaggacaataaagttacagaaggttctacggtttcaatcaattatgtttcaggatcatctagaaaaatagaaacaatggtgttatcgaaacgaactttagctgagaattctaatgttctcgtagtagacgattttatgagggctggtggctcaattaatggagtaatgaatttaatgaatgagtttaaagcccatgtaaaaggggtatcagtacttgtagaatcaaaagaagtaaaacaaagattaattgaagattatacttccttagtcagattgtcagatgtcgacgagtacaaccaagaatttaaagtggaaccaggcaacagtttgtctaaattttcttaa

SEQ ID NO: 8066 - DNA, 381 bp, Staphylococcus epidermidis; identical to SEQ ID NO: 2911

SEQ ID NO: 8067 - DNA, 309 bp, Staphylococcus epidermidis; identical to SEQ ID NO: 2912

SEQ ID NO: 8068 - DNA, 1356 bp, Staphylococcus epidermidis; identical to SEQ ID NO: 2913

SEQ ID NO: 8069 - DNA, 966 bp, Staphylococcus epidermidis; identical to SEQ ID NO: 2914

SEQ ID NO: 8070 - DNA, 660 bp, Staphylococcus epidermidis; identical to SEQ ID NO: 2915

SEQ ID NO: 8071 - DNA, 573 bp, Staphylococcus epidermidis; identical to SEQ ID NO: 2916

SEQ ID NO: 8072 - DNA, 3501 bp, Staphylococcus epidermidis; identical to SEQ ID NO: 2917

SEQ ID NO: 8073 - DNA, 1542 bp, Staphylococcus epidermidis; identical to SEQ ID NO: 2918

SEQ ID NO: 8074 - DNA, 1191 bp, Staphylococcus epidermidis; identical to SEQ ID NO: 2919

SEQ ID NO: 8075 - DNA, 264 bp, Staphylococcus epidermidis; identical to SEQ ID NO: 2920

SEQ ID NO: 8076 - DNA, 402 bp, Staphylococcus epidermidis; identical to SEQ ID NO: 2921

SEQ ID NO: 8077 - DNA, 402 bp, Staphylococcus epidermidis; identical to SEQ ID NO: 2922

SEQ ID NO: 8078 - DNA, 1299 bp, Staphylococcus epidermidis; identical to SEQ ID NO: 2923

SEQ ID NO: 8079 - DNA, 540 bp, Staphylococcus epidermidis
atgcataaggatttaaagaatgttttgttatcggaagaagacattcaaaatatttgtaaagagatgggagctatcattactgaggattataaagatcgcccactcttttgtgttggtattttgaagggatcagtcatgtttatggcagacttaattaaacgtattgatacacatttatcaatcgattttatggatgtttcaagttatcatggtggaacggaatcgactggggaagttcaaatattgaaagatttaggtgcttctatagaaaataaagacgtacttataattgaagatatattagaaactggtacaactttaaaatctattacagagttattgcaatcacgtaaagttaactctttagaaatagctacattattagataaacctaaccgtcgcaaagctgatatcgaagcaaaatatgttggtaaaaagattccagatgaatttgtagttggttatggtttagattatcgtgagttatatagaaatctgccatacataggcacactaaaagcagaagtttattctaaatag

SEQ ID NO: 8080 - DNA, 2103 bp, Staphylococcus epidermidis; identical to SEQ ID NO: 2925

SEQ ID NO: 8081 - DNA, 882 bp, Staphylococcus epidermidis; identical to SEQ ID NO: 2926

SEQ ID NO: 8082 - DNA, 933 bp, Staphylococcus epidermidis; identical to SEQ ID NO: 2927

SEQ ID NO: 8083 - DNA, 819 bp, Staphylococcus epidermidis; identical to SEQ ID NO: 2928

SEQ ID NO: 8084 - DNA, 366 bp, Staphylococcus epidermidis; identical to SEQ ID NO: 5745

SEQ ID NO: 8085 - DNA, 480 bp, Staphylococcus epidermidis; identical to SEQ ID NO: 2930

SEQ ID NO: 8086 - DNA, 1488 bp, Staphylococcus epidermidis; identical to SEQ ID NO: 2931

SEQ ID NO: 8087 - DNA, 117 bp, Staphylococcus epidermidis
atggaaacttcagttcttatccccacaaatgatatttcacgacatgtaaatgatattgtagaaacaattcccgatactgaatttgatgaattcagacatcatcgtggcttaatataa

SEQ ID NO: 8088 - DNA, 990 bp, Staphylococcus epidermidis; identical to SEQ ID NO: 3164

SEQ ID NO: 8089 - DNA, 516 bp, Staphylococcus epidermidis; identical to SEQ ID NO: 3163

SEQ ID NO: 8090 - DNA, 2523 bp, Staphylococcus epidermidis; identical to SEQ ID NO: 3162

SEQ ID NO: 8091 - DNA, 1218 bp, Staphylococcus epidermidis; identical to SEQ ID NO: 3161

SEQ ID NO: 8092 - DNA, 1002 bp, Staphylococcus epidermidis
atgtatcaagccgctttatttttggcaagatttaaagtattgatgtcattgattcaatctctatataacagtaaaaaatttcaaaatagattccttttcaatttaggtattaagcattataattttaataatgatattagaaaggtgattatgatgagcaagtatgtaataacgaaaacactcaataacaatgtcatcatatgcacaaaaaatcatcaagaggttgttttaattggtaaaggtattggttttaataaaaaggttggtatgacagttcaagagaatgcttcaatagaaaaaatttataaattagaacaacaagagcaacaagaacactacaaaacacttttggagctcggagaagatcatgttgttcaagcggtgatagaatcagttaatattatcaatgaatctggtctaattacagatgataaaaatttggttgttgcacttacagatcacatcatttatgcctataaaagacttaagcaacatcaaatgattacaaatccatttgtgattgaaacaaaacatctctatagtaatgcatacaatgttgctcgaaaggtaatcgataaattaaataaaaccttagacgtacattttccagaagatgaaattggattcatcgcattacatattgcatccaactctgaaaaattatcaattcacgatatttcagtaataaacaagttaatcaataagagtattacaattattgaaactgatttacaacattcaattgataaacaaacaatacaatatcagcgttttataagacacatacaatttttaatatatcgattaactaaaggtgagtatttagaagcacaggagaattttatatcgatgataaaaactatgtatcctcgtagttttaatacggcttataaaatattaaaaatgattcaacgtgagtttagtgtgtatgtatacgaagcggaaatagtttatttaacattacatatcaatcattttgaagttcaaattagtagtgaataa

SEQ ID NO: 8093 - DNA, 1458 bp, Staphylococcus epidermidis; identical to SEQ ID NO: 3159

SEQ ID NO: 8094 - DNA, 2403 bp, Staphylococcus epidermidis
ttgagtgagataattcaagatttgtcacttgaagatgttattggtgaccgatttggacgttatagtaaatatatcattcaagaacgtgcattacctgatgtacgtgatggtttaaaaccagtacaacgacgtatactattcgcaatgtattcaagtgggaatacgtatgataaaaatttccgtaaaagtgcgaaaactgtcggtgatgtaataggtcaatatcatcctcatggagactcttcagtatatgatgctatggtgcgcttaagtcaagattggaagttacgtcatgttctaattgaaatgcatggtaataatggtagtatcgataacgatcctccagctgctatgcgttacacagaagctaaacttagtcaattatcagaagaactattaagggatattaataaggaaacagtatcatttattccaaactatgatgacacaactttggaaccaatggtattaccagcgagattccctaatttattaattaatggatctacggggatttcttcaggatatgctactgatatcccgccgcataacctcgccgaagtaatacaaggcacattgaagtatatcgatcaacctgatattacaattaatcaactgatgaaatatatcaaagggcctgactttcctacaggtggtatcattcaaggaatagaaggtataaaaaaagcgtatgagaccggtaaaggaaaggttgtcgtgcgttcacgagtagatgaagagcctttaagaagtggacgtaaacaattaattgtgactgaaattccgtatgaagtgaataaaagtagtttagttaaaagaattgacgaattacgtgccgataaaaaggttgatggtattgtagaagttcgagatgagactgatagaactggattacgaattgcaatcgaattaaaaaaagatgctaatagcgaatcaatcaaaaactatttatataagaattcggatttacaaatttcatataattttaatatggttgctattagtgaaggtcgccctaagttgatgggattacgtgaaattatagaaagttatttaaatcatcaaattgaagtggttacaaatagaacgcgttatgacttagagcaagctgaaaaacgtatgcatattgtggaaggattaatgaaagctttatctatacttgatgaagttattgcattgatacgtaattctaaaaataaaaaagatgctaaagataatttagttgcagagtatgactttactgaagctcaagcagaagctattgtcatgttacagctgtatagattaacaaatactgacattgaagctttgaaaaaagaacatgaagagttagaagctttaataaaagaattaagaaatatcttagataatcatgaggcacttttagcagtaattaaagatgaactaaatgaaattaaaaagaaatttaaagtggatcgactatctacaatcgaagctgaaatttccgaaatcaaaattgataaagaagttatggtgcctagtgaagaagtgattttaagtttgacgcaacatggctatataaaacgtacatctacacgtagttttaacgcaagtggtgtgactgaaatcggtttgaaggacggcgaccgtttattaaaacatgaaagcgtgaatactcaagatactgttcttgtatttacaaataaaggtagatatttgtttatacctgttcataaattagccgatatccgttggaaagagcttggtcaacacatatcacaaattgtgccaatagatgaagatgaagaagtggtaaatgtatacaacgaaaaagattttaaaaatgaagccttttatattatggctacaaaaaacggcatgattaagaaaagtagtgcttcacaatttaaaactactcggtttaataaaccactcataaatatgaaggttaaagacaaagatgaacttattaatgtcgttcgattagagtctgatcagttaattactgttctaacccataaaggcatgtcattaacttattcaactaatgaattatcggatacaggcttaagagcagctggtgttaaatcaattaatcttaaagatgaagactatgttgttatgacagaagatgtgaacgactcagattccataataatggttacacaacgtggtgctatgaagcgtattgattttaatgttcttcaagaagctaaacgtgcacaacgtggaattactttactaaaagaattaaagaaaaaaccgcatcgaattgtggcaggtgcagtagttaaagaaaatcacacgaaatatattgtattctctcaacatcatgaagaatatggtaatatcgatgatgtacacttatctgaacaatatactaatggatcatttattattgatactgatgattttggagaagtagaaagtatgattctagagtaa

SEQ ID NO: 8095 - DNA, 2001 bp, Staphylococcus epidermidis
ttggcaatgaataaacaaaataattattcagatgattcaattcaggtacttgaaggactagaagcagttaggaagagacctggtatgtacattggatcaactgataaacgaggattacatcatcttgtatatgaagttgtcgataactccgtcgatgaagtattaaatggttatggtgatgcgattacagtaacaattaatcaggatggtagtatttctatagaagataatggtcgaggtatgccaacaggtatacatgcgtctggcaaacctactgcagaagttatatttactgttttacatgctggaggtaaatttggacaaggaggttataaaacatctggaggtctccatggggtgggtgcttctgtagtaaatgcccttagtgaatggcttgaagttgaaattcatagagatggtaatatctacacacaaaatttcaaaaatggtggtattccagcgacaggtttagtaaaaactggaaaaacaaaaaaaactggtactaaagttacatttaaaccagactcagaaatatttaagtcaacgacgacttttaattttgatattttaagtgagcgtttacaagaatctgcatttttacttaaagatttaaaaattacacttactgatttacgtagtggaaaagaacgagaagaaatttaccattacgaagaaggaattaaagaatttgttagttatgtcaatgaaggtaaagaagtattacatgatgttactacatttgcagggcattccaatggaatagaggtagacgtagcattccaatataatgatcagtactctgagagcatattaagttttgtaaataatgttcgtacaaaggacggaggtactcatgaagttggtttcaaaacggcgatgactcgtgtttttaatgaatatgcacgtcgtataaacgaactgaaagataaagataaaaatttagacggtaatgatatacgcgaaggtttaacagcgataatttcagtacgtataccagaagaacttcttcaatttgaagggcaaacgaaatcaaaacttggcacttcagaagcaaggagtgctgtagactctgttgtttcagaaaaactaccatattacttagaagaaaagggccaattatctaaatcattagttaaaaaagcaattaaagctcaacaagcacgcgaggctgctcgtaaagctagagaagatgcacgctccggaaagaaaaataaacgtaaagatacattgttatcaggtaagttaactcctgcgcaaagtaaaaatactgataaaaacgagttatatctagttgagggtgattcagcgggaggttctgcaaaattgggacgcgaccgtaaattccaagctattttacctcttcgtggaaaggttattaatacagaaaaggcacgtttagaggatatttttaaaaatgaagaaattaatacgattattcatactattggtgctggtgttggtactgactttaaaattgaggatagtaattacaacagaattattatcatgacagatgctgatacggatggtgcacatattcaagtattattgcttacatttttctttaaatatatgaaaccacttgttcaagctggacgtgtctttattgcgttaccgcctttatacaaattagaaaaaggcaaaggtaagaataaaaaagttgagtacgcttggactgatgaagaattagaaaatttacaaaagcaattaggaaaaggtttcatattacagcgttataaaggtcttggtgaaatgaatccagaacaattatgggaaactaccatgaatccagaaactcggacattaattagagttcaagttgaagatgaagttcgttcatcaaaacgtgtcactactttgatgggggataaggttgccccacgaagagagtggattgaaaaacacgttgaatttggtatgcaagaagatcaaagcattttggataataaagaagtccaaatactagagaatgaaaaatatattgaggaggaaacgaattga

SEQ ID NO: 8096 - DNA, 609 bp, Staphylococcus epidermidis; identical to SEQ ID NO: 3156

SEQ ID NO: 8097 - DNA, 297 bp, Staphylococcus epidermidis; identical to SEQ ID NO: 3155

SEQ ID NO: 8098 - DNA, 468 bp, Staphylococcus epidermidis
atgatatacagtttgactgaaattgaagcaagatatcaagaaaccgataaaatgggggttatctatcacggtaactacgcaacatggtttgaagttgcgagaacagactatataagaaagcttggcttcagttatgcctctatggaagaacaaggtgttatttcaccagttgtagatttaaaagtgcaatataaaaaatcaatttactatcctgaaaaggtgacagtaaaaacatgggtggaaaaatattctagattacgttcaacttattgttatgaggtttataatgaaaatggagagttagctactactggttcaacagaacttatctgtattaaagcagatacatttaaacccatacgcttggatagatattttcctgagtggcatgagacttatagtaaagttaaccagttaaataaagaaggtaaagatgctaaggttacgtttggcattaatcatttataa

SEQ ID NO: 8099 - DNA, 2706 bp, Staphylococcus epidermidis
atggcttctaatattaaagaacaagcaaagaaacaattcgaattaaatggccaatcatatacttactatgacttacaaacattagaagaaaaagggctagctaaaatttctaaattaccatactcaattcgcgtattgttagaatctgtgttacgacaagaggatgattttgttataacagatgatcatatcaaagcattaagtaaattcggaaatgcaggtaacgaaggtgaagttccattcaaaccttctagagttattttacaagactttacaggtgtgccagcagtagtagatttggcttctttacgtaaagctatgaatgatgttggtggggatattaataaaatcaacccagaagtacctgtggatttagttatcgaccattcagttcaagttgatagttacgctaatccagaagcattagaacgtaatatgaaattagaatttgaacgtaactatgaacgttatcaatttttaaactgggcaacaaaagcttttgataactataatgcagtacctcctgctacaggtattgtccatcaagtaaacttagagtatttagcaaatgtagtacatgtaagagatgttgatggtgaaaaaacagcatttcctgacactttagtaggtactgattcacatactacaatgattaatggtattggtgttctaggttggggcgttggtggtatcgaagccgaagcaggtatgttaggacaaccatcatatttcccaattcctgaagttatcggagtgcgtttaactcactctttaccacaaggctcaacagctacggatttagctttacgtgtgactgaagaattacgtaaaaaaggtgtagttggaaaatttgttgaattcttcggtccaggtgttcaacatttaccattagcagacagagctacaattgctaacatggctccagaatatggtgcaacgtgtggtttcttcccagtagatgaagaatcattgaaatatatgaaacttacaggccgtgacgaagaacatattgaattggttaaagaatatttacaacaaaaccatatgttctttgatgtagaaaaagaggatcctgaatatacagatgttattgatttagacttatctacagtagaggcatcactttctggtccaaagcgtccacaagacttaattttcttaagtgatatgaaaaaagaatttgaaaaatcagtaactgctcctgctagtaatcaaggacatggacttgatcaaagtgaatttgataaaaaagcagaaattaattttaatgatggatctaaagcaacaatgaaaacaggagatatagcaattgctgctattacctcatgtactaacacttctaatccatatgttatgttaggtgctggtttagttgctaaaaaagctgtagaaaaaggattgaaagtaccagagtttgttaagacgtcacttgctccaggttcaaaagttgttacaggatatttaagagattctggattacaacagtatttagatgatttaggtttcaatcttgttggttatggttgtactacatgtattggtaactcagggccactattacctgaaattgaaaaggcagttgcggatgaagatttattagtaacttcagttttatcaggtaatcgtaattttgaggggcgaatccatccattagtgaaagcaaactatttagcctcaccacaacttgttgtagcttatgcgcttgctggtacagtagatattgatttacaaaatgaaccaattggtaaaggtaaagatggtaaagatgtatatttacaagacatttggccttcaatacaagaagtttctgatactgtagataaagttgttacacctgaactattcttagaagaatataaaaatgtatatcataacaatgaaatgtggaatgaaatagatgtaaccgatgaaccattatatgatttcgatcctaattcaacatatattcaaaatccaacatttttccaaggattatctaaagagccgggtaaaattgaaccacttaaaagtttgagagttatgggtaaatttggtgattctgttacaacagaccatatttctccagcaggtgctatcggtaaagatacaccagcaggaaaatacttattagatcatgatgttgcaattcgcaactttaactcttatggttcccgtcgcggtaaccacgaagttatggtacgtggtacatttgccaatattcgtatcaaaaaccaacttgctccaggtactgaaggcggatttacaacatattggcctaccggagaaataatgcctatatatgatgcagcaatgaaatataaagaagatggaactggcttagttgtcttagctggtaatgactatggaatgggatcttctcgtgactgggctgcaaaaggtaccaatttattaggagttaaaactgtcattgcacaaagctatgaacgtattcatcgctctaacttagttatgatgggtgtactaccgcttcaattccaacaaggagaatctgcagaagcactgggtcttgatggaaaagaagaaatatctgtagatattaatgaagatgtacagccacatgatcttgtaaatgtgactgcaaaaaaagaaaatggtgaaatcattaatttcaaagctattgtacgttttgattcactagtagaattagattattatcgtcatggtggtattttacaaatggtactaagaaataaacttgcgcagtaa

SEQ ID NO: 8100 - DNA, 1641 bp, Staphylococcus epidermidis; identical to SEQ ID NO: 3152

SEQ ID NO: 8101 - DNA, 351 bp, Staphylococcus epidermidis; identical to SEQ ID NO: 3151

SEQ ID NO: 8102 - DNA, 3030 bp, Staphylococcus epidermidis
ttgaagcctttacatatagttatggagaactttggcccttttattaaagaaactattgattttgagcaagttgaaactgatcaactctttttaattagtggtaaaactggatctggtaaaacaatgatttttgatgctatagtatacgcattatacggtatggcttcgaccaaaactagaaaagaaggagatttaagaagtcattttgcagacggtaaatcgccaatgtctgtaatttatcaatttaaagttaataatcaaacttttaaaattcatagagaagcgccatttattaaagaggggaatataactaaaacacaagccaagttaaatatatatgaattagttgataatcaatttgaattaagagaaagtaaagtgaatcaaggtaatcaatttatcgtacaattattaggcgttaatgctgaacaatttcgtcaattatttattttgcctcaaggagaatttaaaaagtttcttcagtcaaatagtaaagacaaacaatcgattcttagaacactttttaatagtgagcgatttgatgagattagacatctacttttagaaaatgtaaagcaagaaaaagtacaaattgaaaatagatacactcaaattgaaaatttatggaatgatatagatacatttaataatgatgaattggccttatataaagaattagagagttctcagacagataaaatgattgaaaaattcccacaatttaatgattatggatgcaaaattctcaagtcatttgaagaagctaagaataaaataactaaggaattagatgatttaaatcataaatataaagtgaatgttgaattaagtgagaatactaaaaaattaaaagcggaaaaaatcaaatttgacgatttgaaaaaagaacaaaattatattgataaattaaagcaagaattaaaaatgattcaggaatctaaagtattaatcacttattttactaggttacaaagtttaaaaaaagataaagatgaattagtgtcacttcatgagcaatcaaaattaaacgaaacaaactatcacaatgaaattaaaggttttcaaaaacaactcgaacatttatcaacacgagaaaatgaaataactcaatttaatcagtatctagaaaaaaaccaagttttcttcaatcaattagataagattattagtagttatcaacaaaaaccggtaattgaagaagaaataaaaagattatacagtgaatataatgatttaataaccaaaaaagaagaattgacgaaagaaatgaacaacaagaacaaagattttgcaattattgaacattacactgaagagatttataagctgaaaaagattatagatgaatctgaaagacaaaaaaaggatgagaaattatttgataaattacaactagataaatcatcttatcttagcaaattaaaagagaagaaagaacagttaaatgaaattgaatcatcaatcaccaatatagatgcgactttaattgatttgaatgacaaaaaggattttgtaaatgaaataaagtccgctatgtcaattggagatacctgtccaatttgtggtaatgaaatacattcattgggagaacatattgattttgaatcaattgctcaaaaaaataataaaataaaacggttagaaattaagaaggtaaaaattcgtgatgaaataatcaaaatagaaactcgaattgaagaattaaatcatagagaaaatgaattaaattgtgagaaacaagaaaagaaggatattagtaagcttcaaaaacagcttaatcatttgaatcaactaaaagacgagcaacaaagcataaataagttagtagaaaattttgagaaacaagaaaaagaaatagttaataaaatacatcagtttgatttagatttgagtcgaaagaacacgcaaaaagaaaaactggaaattcaaattaatgattttgaacgacattcacaattttcatcagtaaatgattttgaaacttattattctcatgctaaaaaacaagttgagacgtatgagtatgagaatgagaaaactaaagataaattgaacgagttgaataataagttaaagatagaaatgaatgatcaaaaacatttaactgagaatttaactcaaacaagtaaggaaataaataatttagaattaaaaatggaaaaagaaatgcaacaacttggttttgagtcttatgatcaagtcaaaagcgctgcagatttaagtgctcaaaaagatgaaatagaaagagaaattaatatttataataagaactatcaaagttatgaaatagagattaacagactcaaagaattggttaagggcaaaaaattattaaatttagaaaaattacgacaatctatagaaaaaacaaacttgaaactagatgaaacgaattcacaaatagctacgattagctataaaatagataataactctaacaaatttaataaaataaaaaatataattcagattctcgatgatgaattaaaagtgcaaaaagaaattttcttgctatcagaaatattagctggtaaaaatgattataaattaacactagaaaattatgttttaatttattacttggaaaaaataatttttcaagcgaatcaacgactttcatttatgagtggaaatagatatcaactgattagaagagaggccatttccttagggttaagtggattggaaattgacgtgtttgattttcattcaaataaatcgagacacataagttcactttcaggaggagaaacatttcaagcatcactagctttagctttaggattaagtgaagttgtacaacaagaatcaggtggaatcactttagattctatgtttatagatgaaggatttggcactttagatcaagaaacactcgaaactgcgatagatacattaattaatttaaaatcatctgggcgcatggttggtataatctcacatgtaagcgaacttaagcaacgcatacctttgattttagaagtgacaagtaaccaatacgaaagtcatacacaatttagaaaaaattaa

SEQ ID NO: 8103 - DNA, 1125 bp, Staphylococcus epidermidis; identical to SEQ ID NO: 5642

SEQ ID NO: 8104 - DNA, 468 bp, Staphylococcus epidermidis
ttgacttatttagtcttttccattgtatttgcatttctaatgggtgctgtcgttatagtgataagaatgaaagcacaacagtttccagtcaatgaaaagaaaattatcttaccaccatttttcatggctaccggtgcattgatgtatgtggtaccatactttcgattaactggtatggaaatgttagaatcattgatattaggtgttttgttttctactgttttaatctggacttctagattcgaagttaaagatgataatatttatatgaaacggtctaaagcatttccaattattttaatatcattattaataataagaacagttattaaaatatttataagtagcgaaattgatccaggtgaaattgctggtatgttttttttactcgcattttgtatgatagtaccttggagatgtgcaatgctttataaatataaaaaattgcaaaagaatcttattaagtaa

SEQ ID NO: 8105 - DNA, 228 bp, Staphylococcus epidermidis; identical to SEQ ID NO: 3147

SEQ ID NO: 8106 - DNA, 1989 bp, Staphylococcus epidermidis
atgtttaatgaaaaagatcaattagctatagatacgatacgtgctttaagcattgatgcaatcgaaaaagcaaattcaggacaccctggattacctatgggagcagcacctatggcgtatactttatggacgcgccaccttaattttaaccctcaatctaaagatttttttaatagagatagatttattctatcagcaggtcatggttcggctttattgtatagcttattacatgtctctggtagtttagaacttgaagaacttaaacaatttagacaatggggttcgaagacgcctggacatccagaatatagacatactgatggcgtagaagttactactggtccattaggtcaaggttttgccatgtctgtagggatggcgttagcagaaagtcatttagcaggtaaatttaataaggaccaatttgatatagttaatcattacacttatgtattagcgtcagatggtgacttaatggaaggtatctcacatgaagctgcatcttttgcaggtcataatcagttagataaattaattgtcctttatgattcaaatgatatatctttagatggagatttagataaatcattttctgaagatacaaaacagcgtttcgaagcctatggttggaactatattctagttgaaaatggtaacgatttagatgagattgataatgcaatcactcaagctaaatcacaacaaggacctactattatcgaagttaaaactattatcggttttggttctcctaataaagctggttcaaatggagttcatggtgccccacttggtgaagaagaacgtgcacttacatttaaagaatatggattagatcctgaaaaacgttttaatgttcctgaagatgtatacgaaatatttaaatcaacaatgttaaaacgtgcaaatgaaaatgaagaggcttggaataatatgcttaaaaattatagtgaagcctatccggaattagctgaagaatttaaattagcaatgagtggtaagttaccaaataattacgctgatgccttaccagaatatgatttaaatcacagtggtgcttctagagctgattcaggagaaataattcaaaaattaagcgagtttgtaccttcattctttggtggatcagcagacttagcaggttcaaataaatctaacgttaaagaagctaaagattataataaagatactccagaaggtaaaaacgtatggtttggtgtacgtgaatttgcaatgggagcagcaataaacggcatggcagcacatggtggacttcatccatatgcagcaacattctttgtattcagtgattacctaaaaccagctttacgattatcatcaatcatgggactcaattcaacgttcatctttactcatgattcaattgctgtaggtgaagatggccctacacacgaacctattgaacaattagcaggtcttcgtgctattcctaacatgaatgttattcgtccagctgatggtaatgaaacacgtgttgcttgggaagttgcacttgaatcagaacacacaccaacatcattagtgttaactcgtcaaaatttaccaactttggatgttgataaacaaacagttgaaaatggtgtgagaaaaggcgcatatattgtttttgaaacagaacaacaacttgaatatttattattggcatctggatcagaagttaatttagctgtagaagccgcaaaagaattagagcaacaaggtaaaggtgtacgagttatttctatgccaaactggtacgcatttgaacaacaatcttctgaatataaagaatcaattttaccttctgatgttactaaacgtatagctatcgaaatggcatcaccacttggttggcataaatatgttggaattgaaggtaaagtcattggtataaatagttttggcgctagtgctcctggagatttagtagttgaaaagtatggattcactaaagaaaatattttaaaacaagtccgttcattataa

SEQ ID NO: 8107 - DNA, 237 bp, Staphylococcus epidermidis; identical to SEQ ID NO: 3145

SEQ ID NO: 8108 - DNA, 234 bp, Staphylococcus epidermidis; identical to SEQ ID NO: 3144

SEQ ID NO: 8109 - DNA, 621 bp, Staphylococcus epidermidis; identical to SEQ ID NO: 3143

SEQ ID NO: 8110 - DNA, 135 bp, Staphylococcus epidermidis
atgaagcaaaaaaataaaaaacaaactgatatacttgaaaaagtgaaagaaatattagataagaaaaaaaaacaaaatcggttggtcagaagttgtattgaatttttctctcgcaacaggtgtggtttagagtga

SEQ ID NO: 8111 - DNA, 942 bp, Staphylococcus epidermidis; identical to SEQ ID NO: 3142

SEQ ID NO: 8112 - DNA, 978 bp, Staphylococcus epidermidis
atgaaaatttttgattatgaagatatacaattaattcccaataaatgtattgttgaaagcagatctgagtgtaatacttcggttaaatttgggcctcgtacttttaaattgccagttgttccagcaaatatgcaaacagtcatgaatgaagaacttgcacaatggtttgcagaaaacgattatttttatatcatgcatagatttaatgaagaaaatagaattccatttataaaaaaaatgcatcatgcagggttatttgcttctatttctgttggagttaaagaaaacgaatttaattttattgaaaaattagcttcttcatcgctcataccagaatatataacaattgatattgctcatggtcactcaaattcagttataaatatgattaagcatataaaaaaacatttaccaaatagttttgtgatagctggtaatgttgggacgcctgaaggagtaagagaacttgagaatgccggtgcagatgctacaaaagtaggtattggtccaggaagagtatgtattactaaaattaaaactggatttggtacaggaggttggcaactttctgcgttaaacctttgtaataaggcagctagaaaacctattattgcagatggagggttaagaacccacggtgatatagccaaatcaattcgttttggtgccactatggtaatgattggctctttatttgctgcccacgaggaatcaccgggtgaaaccgtcgagctagatggcaaaaaatataaagaatattttggtagtgcctcagaatatcaaaaaggtgaacataagaacgttgaaggtaaaaaaatgtttgtagaacacaaaggatctcttaaagatacccttactgaaatggaacaagatttacagagttcaatttcatatgcaggaggaaaggacttgaagtcattaagaacagttgattacgtcatagttagaaattcaatttttaatggtgatagagattag

SEQ ID NO: 8113 - DNA, 270 bp, Staphylococcus epidermidis; identical to SEQ ID NO: 3140

SEQ ID NO: 8114 - DNA, 150 bp, Staphylococcus epidermidis; identical to SEQ ID NO: 3139

SEQ ID NO: 8115 - DNA, 1515 bp, Staphylococcus epidermidis; identical to SEQ ID NO: 3138

SEQ ID NO: 8116 - DNA, 1449 bp, Staphylococcus epidermidis
atggaagataataatatgaaacgtggtctcaattcgagacatatatcaatgatagctataggtggcgctataggtactggactttttgtggcaactggaagtgtcatttctcaagctggcccaggaggagctatattagcttatatactaattggtattatgctttattttttaatgtcatcaataggagaattagcaactttctatccggtttctggttcttttagttcatactctaccagatttgttgattcgtcacttggttttacaatgggttggttgtattggggtatgtggtcacttgtaacaagtgtagatatcattgttgcttccaatgtattacaatattgggatgtatttaaagttttaaatccacttacatggagcttaattttcttaactctgttgtttttaattaatattttttctgttaaagcttttggagaaactgagttttggttatcactgatcaaagtcattactataattgtatttattatttttggaattatgatgattttcggtattcttggtggtcatacatatggctttgagaattatactaaaggtcaagcaccttttgtcggtggaatatcaggcatattaagcgttcttttagttgcaggtttttcagttggtggtactgaagtagtcgcagtaacagctggtgaatcaaataatcccgaaaaatcaatgcctaaagctataaaacaggtattttggagaatattactcttttacgtattgtctatagctgtgatagctgccatcattccatatacggatccacttttacttaatgaaaatgagtctgtatcacaaagtccgtttacaattgttttcgataaaatagggatcgcttttgctgcatccgtcatcaacgctgttatcttaacatcattattatcagcagctaactctggtatttatacaacaagtagaatgctattttctttaagtgctgataaacaagcacctaaattctttggaaaactcaatgataaaactaaattacctatgcgtgcattaattacaacatatattattattgtattagtcattgtttatgctaattttaatgctaatgctgtatttaacttattaaatatcataggatctatggttattgtagtttggggatctagtatttggtcacaaattagattaagacaagcaattaaaaaacagggtaaaaatccagataaactgttgccatataaagcacctttttacccagtcggacctattattgtccttttcacattattattcttattattaggtagttcctttggtagtatcgcatctggtgatattttaggtgtcattcgaaactttacaccattatttattctagctatcatctatattgctcataaattaatcaaacggacacattttgtcaaactggaagaaatagatttaactccgcataattacaagaattaa

SEQ ID NO: 8117 - DNA, 315 bp, Staphylococcus epidermidis; identical to SEQ ID NO: 3136

SEQ ID NO: 8118 - DNA, 555 bp, Staphylococcus epidermidis; identical to SEQ ID NO: 2774

SEQ ID NO: 8119 - DNA, 1449 bp, Staphylococcus epidermidis
atggcgtattttaataaatttttaagcaattctgaaaggaagcgtggaaaagtgagtaagaaagtggcaattattggagcgggaatcactggtttatctagcgcatatttcattaaaaaacaagacccttctattgaagtaactatcttcgaagcctcaaatagagtaggtggaaagattcaaacatatagatcagatggttacacaattgagttaggccctgagtcttatttaggtcgtaagacaattatgactgatgtggcaaaagatattggattagaaaatgaccttataacaaatactactggccaatcttatatttttgctaaaaataaattatatcctattcctggtggctcaattatgggaattcctacagatattaaaccatttattaaaacaagactcatttcacctattggtaaattaagagcggggcttgatttgtttaaaaaaccgatagaaattgaagatgatatttctgttggtagtttctttagacaacgattaggtaatgaagtattagagaacttaattgaaccactaatgggtggtatttatggcactgatattgatcaattgagcttaatgagtacatttcctaactttaaggaaaaagaggaacaatttggtagtttgattaaaggaatgaaagacgaaaaagaacaacgtattaagaaacgtcaattatatccaggtgctcctaaaggacaattcaaacagtttagacacggattgagttcttttatagaggctcttgttaaagatattgaaagtaaaggtgtccacatacgatataacacgccagtcaaagatatattgatttcgcaaaaagattatgaaattttattagaagatgacagtaaagagaaatttaatggcttacttgtaacaacaccacatcaagtatttctgaactggtttagtcacgatccagcatttgattactttaaaaacatggattctactactgtcgcaacagttgttttggcctttgatgagaaaaatattaccaatacgtacgatggaactggctttgttattgcaagaacaagtcaaacggatattactgcatgtacttggacatcaaagaaatggccatttactactccagaaggtaaagttttaattcgagcatatataggaaaaccaggtgatactgtagtagatgatcacaccgatgaagaaatagtatcaattgttagaaaagacttaagccaaatgatgaccatctcagggaatcctgattttacaattgtaaatcggttacctaagagtatgccccaataccacgtgggtcatattaaaatgattaaagaaattcaacaacatattaaaacaacttatcctagattacgtgttacaggggcaccgtttgaagctgtcggtttaccagactgcatacaacaaggtaagaatgcagttgatgaaatattagaagagttataa

SEQ ID NO: 8120 - DNA, 924 bp, Staphylococcus epidermidis
atgactaaaacaataggcttattagtaatggcgtatggtacaccatataaagaaagtgatatagagccttattacactgatattagacgtggaaaaaaaccaactgaagaagaactgcaagatttaaaggatagatatgaatttattggtgggctttctcctttggcaggaacaaccgatcgtcaagccgaagcattactcgaagcattaaataaagaacaagatgatgtgaattttaaactttatctcggattaaaacatatatctccatatattgaagaagcagtagagcaaatgcataatgatggaattaaagaagcagtaacagttgttcttgcgcctcattattctagtttttctgttggctcttatgatcaacgtgctcaagaaaaagcagatgaatatggcatccagttaacacatattaaacactattatcagcagccaaaatttattaaatattggacggaaaaaattaatgaaacattagaacaaatacctaatcaagaacatgatgaaactgtattagtagtttctgcacatagtttaccaaaagggttaattgaaagaaataatgatccatatcctcatgaattgcatgaaacagcgaaaattcttaaacaggaatctaacatcatccatgttgctgaagggtggcaatcagaggggaatactggaacaccttggttaggcccagatgtccaagatttaactcgtgatttatataaggaacaccagtttaagcactttatctatacgccagtaggttttgtttgtgaacatttagaggtgctttatgataatgattatgaatgtaaagtggtttgtgacgatattggggtaaattactatcgtccagaaatgcctaacacacatccattatttatcggtgctattgttgacgaaattcaatcacatatataa

SEQ ID NO: 8121 - DNA, 1035 bp, Staphylococcus epidermidis
gtgcgcagcaaaaacgatacaattttaaaagctataaaaggagaaagtacgttacatacacctgtttggtttatgagacaggctggacgttctcaacctgagtatcgaaaattaaaagaaaaatattctctatttgaaatcacacatcaaccggaattgtgtgcatatgtgacacatttaccagtagataattatcaaaccgatgcggctgtattgtacaaagatattatgacaccactcaaaccaattggtgtagatgtcgaaattaaatcaggaataggacctgtaatttccaatcctattcaaactgttaaagatgtagaaaggctatcccaaatagatcctaaaagagatgtcccatatgtattagatacaattaagttactcactgaagaaaaacttaatgtacctttaataggttttacaggagcgccatttactttagcatcttatatgattgagggagggccttcaaaaaattataattttactaaagcgatgatgtatagagatgaggaaacatggtttgctttaatgaaccatctcgtcgacatttctattgattatgttgtagcacaagtggaagcaggagcggaaatcattcagatttttgattcctgggttggtgcactcaatgtgaaggattatcgctattatattaagccagccatgaataaattgatttctggcattaaagcttattatgatgtacctatcattctttttggtgtcggtgcaagtcatttaattaatgaatggaatgatttaccgatagatgtactaggccttgattggagaactacaataaagcaagctgacaaaatgggagtcaataaagcaattcaaggtaatttagacccatctgtactgttagcgccatgggatgtcatagaatcacgactcaaagacatattaaatcaaggtttaaatcgtggaaagcatattttcaatttaggtcacggtgtatttccagaagttaaaccagaaactttgcgaaaagtgactgaatttgttcataattatacagcgaaatag

SEQ ID NO: 8122 - DNA, 504 bp, Staphylococcus epidermidis
atgtatttatatacatcttatgggacttaccaatttttaaatcaaattaaacttaatcatcaagaacgtaatttatttcaattttccactaatgattcctcaataatcttagaagagtctgagggaaaatcaatcttaaaacatcctagtgcatatcaagtgattgatagcacaggtgaatttagcgaacatcatttttatagtgctatttttgtccctacatctgaagatcaccgtcaacagctagagaaaaaattattacacgtagacgtacctttaagtaattttggtggttttaaaagctatcgtttattaaaacccactgaggggtctacctacaaaatttactttggttttgcaaatcgaacagcatatgaagatttcaaagcttctgatatatttaatgaaaacttttcaaaagatgcattgagccaatactttggtgctagtggtcaacattccagctattttgaaagatatttatatccaatagaagatcattaa

SEQ ID NO: 8123 - DNA, 624 bp, Staphylococcus epidermidis; identical to SEQ ID NO: 2779

SEQ ID NO: 8124 - DNA, 1224 bp, Staphylococcus epidermidis; identical to SEQ ID NO: 2780

SEQ ID NO: 8125 - DNA, 741 bp, Staphylococcus epidermidis; identical to SEQ ID NO: 2781

SEQ ID NO: 8126 - DNA, 426 bp, Staphylococcus epidermidis; identical to SEQ ID NO: 2782

SEQ ID NO: 8127 - DNA, 372 bp, Staphylococcus epidermidis; identical to SEQ ID NO: 2783

SEQ ID NO: 8128 - DNA, 561 bp, Staphylococcus epidermidis; identical to SEQ ID NO: 2784

SEQ ID NO: 8129 - DNA, 978 bp, Staphylococcus epidermidis
atgaaattaatgaataaaattatcgtacctgtaacagcaagtgcacttttgttaggtgcctgtggttcaaatgcaactgaatcgaaggataacacacttatttcttctaaagctggtgatgttaaagttgctgacgtaatgaaaaaaatgggcaaagaacaaattgctaacacatcttttagcattgtattaaacaaagttttagcagataaatataaagataaagtagatacaaaagatattgataaagatattaaaaaagaagagaaacaatacggcggtaaagatcaatttgaaagcatgttaaaacaacaaggtatgtcacttgatgattataaagaacagaagaaattatcagcttatcagaaacaattgttactagataaagttaatgtatcagataaagaaatcaaagaaaactctaaaaaaacatcacacattttaattaaagttaaatctaaatctagcgataaagaaggtttatcagataaaaaagcgaaagaaaaagctgaaaaaattcaaaaagaagtggaaaagaatccaaataagtttggagaaatagcaaaaaaagaatcaatggacagttcttcagctaagaaagatggttcattaggttatgtgattaaaggtcaaatggtagatagcttcgaaaaagcactatttaaattaaaagaaggagaagtttctaaagtcgtaaaaacagactatggctatcacattataaaagcagataaagaaactgattttaatagtgaaaaatcaaatatcaaacaaaaattaatcgaagaaaaggtacagaagaaacctaaattattaactgatgcatacaaagaattattaaaagagtataaagtagactacaaagatagagatattaaaaaagcaattgaggattctattcttgatccagataaaatcaaacaacaacagcaacaacaatcacaaggtggttctggattaactaattcaggttcttaa

SEQ ID NO: 8130 - DNA, 942 bp, Staphylococcus epidermidis; identical to SEQ ID NO: 2786

SEQ ID NO: 8131 - DNA, 2940 bp, Staphylococcus epidermidis
atgataattaaatcattagaaatatacggatatggccaatttgttcaacgtaaaattgaatttaatcgtcaatttactgagatatttggtgagaatgaagctggtaaatctactattcaagcatttattcactctattttgttcggatttcctactaaaaagtccaaagaaccacgtttagaaccaagattaggtaatcaatatggtgggaaattatcactcattttcgacgatggcattgaagcagaggttgagagaatcaagggaagtgctcatggagatgtcaaaatttatcttaaagatggtactattcgagatgaagtttggctaaataaaaaacttaattacatttcaaagaaaacatatcaaggtatattctcttttgatgttttaggtcttcaagatattcataaaaatctagatgaagagcaactacaagattatttattagaagcaggtgcacttggatcaactgaatttacaagtatgagagatagaattggacaaaagaaagaagaattatataaaaaatctggaaaaaatccaattattaatcaacaaattgagcaacttaaacaattagaaaatcaaattcgaaatgaagaaagtaaacttgatacatatcatcgacttgtagacgataaagataaatcatcaagaagactagaaaatttgaagcaaaatttaaatcaattatcaaaaatgcatgagcaaaaacaaaaagaggttgctctacacgatcaaacacaagaatggaaaaggttagaacagtcgcttaatatagagcctataaattttcctgaaaaagggatagatagatacgaaactgctaaatctcacaaacaatcacttgaacgagataaaagtttgcgagaagaaagattaagcatattaaataaagaggcggagtccatcaatccagtagaccaaaagtatattgattcgtttaatagcctttatcaacaagagactgaaattaaacaaaaagaatttgagttacgttcaatagagaaagatattgctgataagcaacgtgaactagaagctcttcaatctaatataggttggcaagaagtgttttacgacgcagacagtactgaagcgatgaaaagtcatatgagtgatttagtattaggcaagcaagaacaaattgcttatatcaatcagttagaacgtggacttgaagaaaataaaattgaaagaaactctaattctaatgagattaatcaagttgagaatgagcttgttcctgacgaaacctttgaaaagaaaaaggaatatacacaacaagttttagaattacatgaaaaagagaacttgtatgaaaagttaaaagaaacttttgaagaagaacaaacacaaaaaaataaaagacaaaagtttttgagaataggatttattgttttgactattctatcagcagcactttctattttttcttttttcactgcaaatcttatttttggtataatatttgctctattaactatgatttttgtagtaggtatcattttttctagatctaaagcagtagattatagcacagcaataagtcaggaaattaatgatttagaaaaccaactcacgcaacttgaaaaagaatataatcttgacttcgatttagaatatcaacaacaagttcgtgaacaatggcgtcatgctaaaaaaaataaaaaaatacttgaagaaaaacatcaatatatcaatcaatcattaacgactgcaaatgagcgattagatagtttaaaacatagcattattgaaataaaaaaagagttacgtttatcagaaaaactttctgatgaattagtggttgaaagtatctcaaccattggtcaaattaaagcgcatgataaatacattattgatttaaatcaacaacgcaataatctgctaaaagatatcaatcacttttatgaacgtgcacaatctgtaactgaaccacatttaaaactatttaatcagatgtctttcttccatgatgtgaaacagtggttaaaaaatgcagaagaacaaaatgaggcttggaataaaaatcaaactgaaacgcaattactcaataatgaattaaagcaattgaagtcacgcttaagtgaaacgaatcaaatgattaagcaattatttgattatgttgatgtagataatgaagaagattattatacacatcatcatcattttgaaacatatcaaagtgatttaaatcgatttaatgatttaaatcaatatttagaaaatcaaaattacacttatgaaatgagttcgcaattaagtgagaaaactactgctcaactagaagaagaagatcatagattggctaaacaagttgacgattacaatgatcaatttttagaaatgcaagcagaagttagtgatttaaatgctcagattaatcatatggaaacagatagaactttagcacaattaagacatgaatattatagcttaaaaaatagacttaacgatattgctaaggattgggcaagcttaagttatatgcaagctttagtggaagaacatatcaagcaaataaaagataagcgtctaccacaagtgattaatgaagctgtatctatttttaaaaatttaacaaatggtacttacaatatgattcattatactgaaaatcataaaatacatgtaaagcattctaacggacaagtatttgagccagttgagttgagtcaatctacaaaagaattattatatgtggctttacgtattagtcttattaaagtattaaaaccgtattatccattcccagtgattgtagatgatgcatttgttcattttgataaatatcgtaaagaacgtatgttgaaatatttgagagaactatcagaacattatcaaatactttattttacttgtacaaaagatcatgtcataccggctaaagaagtattaactttaaataaattacaggaaggcgggaaaaaatga

SEQ ID NO: 8132 - DNA, 1197 bp, Staphylococcus epidermidis
atggttaaatttatacactgtgctgatttgcatttggacagtcctttcaaatctaaaagttatcttagtccaaatatttttgaagatgtccaaaagagtgcatatgaaagttttaaaaacatagtcgacttagctttaaaacaggaagtcgattttattattatagcaggtgatttatttgatagtgagaatcgtacattgcgtgctgaagtctttttaaatgaacaatttgaaagattaagaaaagaacaaatatttgtttatatttgccatggcaaccacgatcctcttacttctaaaataacaagtcagtggcctaataacgtatccgtattttcaaatcaagtagagacatatcaagctatcactaaatcaggagaaacaatttatattcatggattcagctatcaaaatgatgcgagttatgaaaataaaatagacgcatacccatcaagtcaaggtcagaagggcatacatattggtgtattacatggaacttatagtaaatcttcggtgaaagaccgttatactgaatttaggttagaagacttaaatcaacgtttataccactactgggcattaggacatatacaccaacgtgaacagttaagtgacatgccagtcattaactatccaggtaatatccaaggaagacatttcaatgaattaggagaaaaaggttgtctattggtcgaaggtgatcatcttaaactcactacacaattttatcctactcaatttattaaatttgaagaagctacaattgaaactgatcatacatctaaacaaggactttatgatgttattcaatcttttaaagataaagtaagaactgaagggaaatcattttatagattgaacgtacgcattaatagtgaagacattattgcaccacaagatttaattcaattaaaagaaatgattactgagttcgaagaaaacgaaaatcaatttgtttttattgaagatttaaatcttcaatatgttcaaaatgacgaaatgccaatagttaaagagttttcaccagaattacttgatgatgcgtcactttttgattcggcaatgactgatttatatcttaatccaagggcttctaagtttttagatgactataatgaatttgataaagttgagttagtcaatcatgcagaaagacttttaaaggatgaaatgagaggtgaacaaaatgataattaa

SEQ ID NO: 8133 - DNA, 345 bp, Staphylococcus epidermidis; identical to SEQ ID NO: 2789

SEQ ID NO: 8134 - DNA, 1134 bp, Staphylococcus epidermidis
atgatgcataccatattattagtagtttttatgataattttaggagcaataattggtggagtaactaatatgattgcaattaaaatgttatttcatccatttaaaccgtattatatttttaggtttcgtattccattcacaccaggtttgatcccaaaacgtcgtgaggaaatcgccagaaaaattggacaagttattgaggaacatcttattactgaagaactaattcgacagaagttaaatcaaccgcaatcgagaaatatgatacagcaattaatccataaacaaataagtaaattaaaaaatgatgatgtgacaataaaaaaaatagctggatttttagggatagatgttaatgagttggtagattataaattgactactaaatttctaaataaactaaacttttggtatgagtcaaataaatatagaaagttaagtgaaatattacctcagtctttcttagatcaatgtaaaggtcaaatagaatatattactgacttcctatgtgaaagggctagaaattatttaagttctgaaaaaggtgaacgtgatatttatgaaatgttagacacatttttcaatgaaaagggacgcatcattggtttactacaaatgtttatgacaaaagaaagcattgctgacagaattcaacatgagttgattagactaactcaacatcctcaatctcaaaaaataattactaaagtattaaatgatgagtatgaaacatttaaagataagaacttagatgagatcattaaagaacaacaatttaaaaattatagtcaattagtacttaatgaattaaaaacttatttaaatctaaaagataaaacagagagacctatcaaacaagttgttccgcagtttattcaattcctagaagatgatacatcaaaacgtatgactgattttattattaaaggtacttcaaaacatttaacaaacattatgaaaaagattaatttacgtcaattagttgaagaacagattaatacatttgacttaaagtatattgaaaatctaattattgatattgccaacaaagaattaaaattaatcatgacattagggtttatattaggaggtatcattggatttttccaaggagtgattgcaatctttgtctaa

SEQ ID NO: 8135 - DNA, 465 bp, Staphylococcus epidermidis; identical to SEQ ID NO: 2791

SEQ ID NO: 8136 - DNA, 624 bp, Staphylococcus epidermidis; identical to SEQ ID NO: 2792

SEQ ID NO: 8137 - DNA, 1134 bp, Staphylococcus epidermidis; identical to SEQ ID NO: 2793

SEQ ID NO: 8138 - DNA, 825 bp, Staphylococcus epidermidis; identical to SEQ ID NO: 2794

SEQ ID NO: 8139 - DNA, 1386 bp, Staphylococcus epidermidis
atgtcagtcagaattgaacatgatacatttggagaaattgaagtaccagaagacaaatattggggtgcacagactgaaagaagtaaacgaaattttccagtcggcaaagagcatatgcctatacaagtcatttatggatttgctcaactaaaaagaggtgcagccttagcaaatcatgaattaggaaaattgagtgatgaaaaaaagaacgccatcgtttatgcttgtgatcgtattttaaatggagaactagataatcattttccacttgtgatttggcaaacaggtagtggtactcaaagcaatatgaatgtaaatgaagtcgtaagctatgtagctaatgaataccttaagaaacatggaagtaaggaaactatccatccaaatgatgatgtaaataaatctcaaagttcaaatgatacatttcctacagctatgcatgtcgcattgttccatgaagttgaaactaagttagagccagcacttaaccatttacgtcaaacttttaaagaaaaagaagaccaatatcaatcaatcattaaaattggacgcacacatttgcaagatgcaacgcctattaaactaggtcaagagataagtggttggcgctatatgttagaaaaatgtgagcaattactatcagaatcaaaaaagcatattttaaatttagcaattggtggaactgcagtaggaacgggaattaatgctcatccagaatttggtcataaagtagccaaatatatttcccaaaacacagggtatgctttcgtatcatctgaaaacaaatttcatgctttaacttctcatgatgaaattgtacaattacatggaacattaaaagcgctagcgacagatttaatgaaaattgcaaatgatattagatggctagcctctggaccgcgtgcaggtcttgctgagatttcaattccagaaaatgaacctggatcttctattatgccaggaaaagtaaatccaacacaatgtgaaatgttaactatggtagcagtacaagtcatggggaatgatacgacggtaggtatcgcaagttctcaaggtaattttgaactaaatgtatttaaaccggtaattatgcataacactttacaatctatttacttattagcagatggaatgaatacctttaataaaaactgtgcaattggtattcaaccgatagaagaaaatattaataattatttaaatcaatcattaatgctagttacggcactgaaccctcatattggatatgagaaagcagctcaaatagctaaaaaggcacacaaagaaggacttactttaaaagaatctgcaatagaaagtggatatgtaactgaatcacaatttgaagagtggataaaaccagaagatatggtagacccacattga

SEQ ID NO: 8140 - DNA, 405 bp, Staphylococcus epidermidis
atgttaagaaaatactggattcactttgtcatagttactgttatagtgagtttgatatctataaaaggttttccacttgctttaggcgctttatacttgccactactgttcaaaattgtacaacttcagcttaatttatcaaaaggtcttattgataatgtcaatgtacatacatttataaaaagtaatcagtctggtgtggtgatcagtgtgatttgttgtctattaataacgggagttttgacatacaccttggatgatttttataatgaattaccaggatttttaggtattttagtaagtataagtcctgttactctcactataggcgtgatactatttgttttaactgcaattgctattgttcaggctactaaagcaaaatatcaacaatctaagaattaa

SEQ ID NO: 8141 - DNA, 183 bp, Staphylococcus epidermidis
atgatggcgaacaaaaaagattccaaattaaattatcatgaagaagaaaatgctatggttaccgacttagatgatttaaaagaattaggaaaagaaatggaacagatttcacaggaaaatgatgaagaaaaattaaatcaatctcatgataacgaagttcgttcagatttaaaaaaacagtaa

SEQ ID NO: 8142 - DNA, 600 bp, Staphylococcus epidermidis
atggcaatgaattttaaagtatttgataatagtgaaaaagtagcagaatatactgcagatattctacgtaagcaatttaataataatccaactactattgcaggatttcatttgagcaaagaacatgcaccagtgtttgatgaacttaagaaaaatgtagaaaatcatacagttgatttcagtcaaataaatattttagattatgatgataatcattcttattatgaggctttgggtgtgccaacaggccaaatttattccatttcttacgaaaatgatgcaattgactttatctcagataagattaagactaaagaaaataaaggcaaactgacaatgcaagtccttacgattgatgaaaatggtaaccttgacattagcgttcgtcaaggtttgatggaagctagagaaattttcttagttattactggtgctaataaacgcgatatggtagaaaaactttaccgtgaaaatggtaagactagttttgaaccatcggatttaaaagcacaccgtatggtcaatgttatcttagataaagaagcggctgcaggcttacctgaagacgtaaaagagtacttcactgcacgttttgcataa

SEQ ID NO: 8143 - DNA, 471 bp, Staphylococcus epidermidis; identical to SEQ ID NO: 2799

SEQ ID NO: 8144 - DNA, 1131 bp, Staphylococcus epidermidis; identical to SEQ ID NO: 5884

SEQ ID NO: 8145 - DNA, 150 bp, Staphylococcus epidermidis; identical to SEQ ID NO: 5885

SEQ ID NO: 8146 - DNA, 723 bp, Staphylococcus epidermidis; identical to SEQ ID NO: 2802

SEQ ID NO: 8147 - DNA, 1458 bp, Staphylococcus epidermidis
atgaagtgtttgttcaaaatgctatcaatcataataataatgttaagtactttcaccttattcatcagtccgagtacatatgcaaatgaagatgaaaattggactaaaataaaaaatcgaggagaactaagagttggattgtctgctgattatgcacctttagaatttgaaaagacgatacatggtaaaactgaatatgcgggtgtagatatagaattagctaaaaagattgcgaaagataatcatctaaagctaaaaattgtaaacatgcaatttgatagcttattaggtgcacttaagaccggtaaaatcgatattattatctccggtatgacaacaactcccgaacgaaaaaaagaagtggattttacaaaaccttacatgattacaaataatgtgatgatgattaaaaaagatgatgcaaaacgttatcaaaacatcaaagattttgaaggcaaaaaaattgctgcgcaaaaagggacagatcaagaaaaaattgcacaaactgagattgaagatagtaaaatttcttcactcaatagattacctgaagctatattatctttaaaaagtggaaaagtagcaggtgtagttgttgaaaaaccagtaggtgaggcatatttaaaacaaaattcagaactaacattttcaaagattaaatttaatgaagaaaagaaacaaacatgtatagctgttcctaagaactctcctgtacttttagataagctaaatcaaacgattgataatgtaaaagaaaaaaatttaattgatcaatacatgacaaaagcagccgaagatatgcaagatgatggaaattttatttctaaatatggcagttttttcattaaaggaattaaaaatactattttgatttcattagtaggtgtggtattggggtctattttaggctcttttatagctttattaaaaataagtaaaattagaccattacaatggatagcaagtatatacatagaatttttaagaggtactcctatgcttgtgcaagtgtttattgtattttttgggactactgcagctttggggttagatatttcagctttaatttgtggtactattgcgcttgttataaattcttcagcctacattgccgagattattagagctggtattaatgctgtagataaaggacaaactgaagctgctagaagtttaggattgaattatagacagactatgcaatcagtagttatgccacaggcaattaagaaaattttacctgcattaggtaatgaatttgtaaccttgattaaagaatcgtctatagtttccacaattggagtgagtgaaatcatgtttaatgcacaagttgtacaagggatatcttttgatcctttcacaccattgttagttgcagcattactatatttcttacttacatttgcacttacacgtgttatgaattttattgaagggagaatgagtgccagtgattaa

SEQ ID NO: 8148 - DNA, 513 bp, Staphylococcus epidermidis
atgaaagaacatggttatcatccagaaaacgtaaattttagagaacctgaagataaagggaattattatttaatttcgtatggtaataaatcgggagcaggcgttggtgctgttagagtttataaagatggtttagtgaaatctggagcaggttctttggctagtactgaaaacgctgatttagataaggtaggctattatcaatttgcaacaaatcaaaattcaacatcctctagtaatattgtaaataatgaacagcaaaatcaaactgctcacagcaatatatcagcacaaaatagtcaacaacaatattctagtaccactgaagaaaataataattctcaattacaagttgaaaataattctttaccagaaactggtgaacaatttaattcttgtttagttacagttattgcttcagtattattagctgtaggatcattattaacattcaaaaaacttctaaatcaaattaagttaagaatattgttaactaataaacttataatttga

SEQ ID NO: 8149 - DNA, 1542 bp, Staphylococcus epidermidis
atgaaatggtataaaaatgaacaattattgaattacgcgaaaaaaactgatgaagctttagataaaaaggatacaaaatcattatatgaaattagtgagaaattagaaaaattatcaaccgattatgttgaatctaagatgatgtatgcttattatttgtacattagttttactagtttaaataattatattgatataaaagttaataacaaagaaaccgtagaatgggaaaaattaattgaaaaaagcttgtttttagctagaactgcgattaattcaatggacgaatatttaaaagatactgaaattgatgaaatagaatacatatatttaaatagtatatataatagtgtaaaaaccaattattgcaatctacttatttctataggaaaatattcatctgcaatatttgagatgagaaaattagcaacttctcagtttggtatggcaattggaaatttagggacagaaatttttgattatgcttgctttgattatacagataataaagagcctctttataaatatgcttatcaattgctagatacggctttaacttatgaagatagtatagtacaccctaatgcaaaagctttttatcaaagtaaaattgatattctcgatgaaatcgataattttaatccctatgatacagagtacaatgtggaatctatattaaaaaaagatagactagatgattataactttacaaataatattactaatgaagactactgggattgggtggcagaaaatagtttagcattgaacacaataaatgatatagattatatggctaaaaataatcaagacactcttcatttgccaaatatattaacgtcaattaatgatcattcatcattttacggaatttttaatcaaattaaacaagagtattgttctgccagatatatactttatgaagggatgtataataacaagaatcatttttcagatgaaaatgtatatttagtaaatacaattgactatcctaaatatggtttaaatatagaaagagtaaaggcagcatatagaagtgcttatgcattgtttgatagaattggatattttttaaataaatatttcaaattaggattgaaagatcataaagtttcttttagaaaaatttggcaaaataaaaatagtaaaatatataagataattgagaataaccttgccttaaaaggtatgtattggacttataaagatttatttgctaaaactaaatcaaaggatttggattatatagataaaaaactaaggcatacctataaaataagaaatgtaatggaacataggtatttaaaagtattagatagtaattttatagaacaagccactaatgaatatgataaattagcatatactattacatcagatgaattaaatgagttagggattaatttaattagaatatgtagagaattaattatattattatgctttacagtaaatataaatgaaaataatataaataaagatgaaaaaaatgaatttgtaactatggcgatccgcgaatttagtggcgaatggaaaatttaa

SEQ ID NO: 8150 - DNA, 1602 bp, Staphylococcus epidermidis
ttggatttattaaaacaagttaacacattaaggggttcaatgacattagaagaattacaggaattagtaattaaaaaaattagcaaacaagaaattgacaatgagtttaaggataattcaactaaagaaataatcaaacaattagaaaataagacagttcaagaattacaaagtatctattatgacttgcaaactatgaaccgtcattcagtatcaacttatactgagtctatcgaatcgctatctttagagattttcaaaacttatagtaatcaaaattcactattagatttaggttcgggaacaggacatatgctatggagagcgagtaaggaaggtcattttaaatacttaaggggagaagaaattaatcataacgtagctgaaattagtgaacagcttctatctcaatcagaaacgaatatagaaattaaaaaaattgattctactttgaattttggaagcaatgataaatttgaatgtatttattcagatgcattatttttaaatgcagataataaacgtttaaaacaaattgaagattccgcttctaacagttatctaaagacaagaagtaaattctctgaatggatatttacaaatcgtattttaaataacttagaggataagggtgtaggaactattgtagtaagaaacgctgctacgtttactgaaatggctaaagatattcgtaaagagttaatagagaaaaatttaataaaagcagttattcaacttccttcgaacttgattactaatacggctatacctacaactttattaattttgcaaaaagataataacgataagattacatttattgatgcttcagaaatttatactcaaaagggcagaatgcagaatacttttgaagatgaaaatattacaactattatgaaagcgctagaagaagagactgatatttctgtaaaagtgaataaacaagaagtcaaagataatgactataatttatctcctattcgttatctagttaatattgaagatcgtcttgtaaatcctaccgagttaactaacatcgtagaaacgattcgtggaaaagatgtttctaaaaaaagattagatgaggaagaaagtaaagacaaagcaggttacttactaaatttatctgatgtaaaagattataaaattgatacccctaaacaacaaatcagtcaagatatactcgatgaatatgagagatatctattaaaacctaaggatattgtattaagtacaagaagttcggatttaaaaatagctattgttaccaaaagtttagctaaagataatctaattatttcttctaattttaatattttaagaattaaagacgataaagtgagtccttactatttatttgcatttttaacaagtgaaataggtattgaacagttaaaacaactaatgacgggaactgtgattaatgttatttcacaaaaatccttgcaagaatataaggtgtctatattagatgaagaaacacaagaagacatcgcctttaaaatggaagaagagttaatcgaatattacagttatttgaaaaaaatcaaaagcttcaaagaaaatttaccacaactttttaaggaaaatggaggggaataa

SEQ ID NO: 8151 - DNA, 540 bp, Staphylococcus epidermidis
ttgggtaaattaagtatcgaagaactaaatgattttttagaagaattattcgatagattaaaacaagaagcaaggctatataatcaacaaagcgaatttgatactttcttagaacgttatcaatttgaaaaaagttatagtacacaaggacatctttatagtgacaatgctaaagttctcattctaggagtgagaaatggaggcttaaaagcaaaagatattaatgggatatttaaaaaagctaaattgaaagatagatatgaaattgtcgaatatgatgatttaacaaattttgatatctctacattagaaaattcaacacaatatacagatgtttttattggtgctgtctctcataaaatgagagggataggtgacaccgataacccagttcaaactcttatagatggatcggaagcaatttatcctaaaatccataaacttatggcaggttcagaactaaaaataactaaaaagaatctaacagacgctatagctaattcatcaatgttaatttttaatagattaacagctatttag

SEQ ID NO: 8152 - DNA, 1158 bp, Staphylococcus epidermidis
ttgattgaagaaaagatattaaatttaattaaagataaacgtgaaggtagatattgggatttcaaagttgagtatcataaaaataaagctgagttactacgtgatataatttgtttggcaaataatctttcaaatgaagaagcatatttaatattaggagtagccgataatggtcatattaaaggggttaataatgacccaaatagaaaaaaacaagaagaactattatcttttatagaaggtaaaaattttgccggtggaaaatatccgtacgttttattaaggactataaaatatgaagaaaaagagatagatattattattattcgccctgatgataaagttccatattatttagagagttcatttactgacgataaagctggtaaatctagaacagttaatgcaggtagtatatatacaagaactgaagataaaaacacaccaattaatactactgctaatccactggatactgaaactttatggaaaattcacttcggtttacatccagagcctattaaaagacttcaaaaatatttgttattttcgaataaatggataaaaaatacaacaggctatttctataatgagtcccctgaatatactatttataataatgaggaatacagcgatgaatatttttcattagatgcgcctttttatgcatataatcaaacgaatagcaatgtcttatattctcaatacgaatgtaaatatcatgatactgtgcttgctagtgaaaagtgtattactttagattcgggtaattatacaaccccaacacctgagcaaggtgtaataatcaatgatttatataaaaaagatacaatttattatcgttattttattgaagatactttgatttataatcttcatctttttatgtataacgaaaaatctatggaacaacaaattgccagaagtgattttttagaatgtgtattgatttttaaaaatgatagcgaacaaaaagaatttgaaaattatatttataaaaattttgatgaagtaaatgaattaatcaataacaatcaaaagcgcgtatttggaatagaacatttagatgatataaagcaaaaaaacattataagaaaaattaatactggaagagttttaaataaacaatttttaaactttagaaaaaattacaattaa

SEQ ID NO: 8153 - DNA, 120 bp, Staphylococcus epidermidis
atgaaaataatattgattacttctatagaggcgttaaagaatagaaaagtgaaagtaagttctgttgtatcacaaacactagaaaaaagtaagagttacgataagtatcaaatgctttaa

SEQ ID NO: 8154 - DNA, 417 bp, Staphylococcus epidermidis
atgtttgaaacgaacatctttgattattctaaagaagatttgatgaaagatgctgaaaatataactgtgtcatcaatcattgaaagagcttcttggactcacttttatgtattcagagatggagatactatcattgcgacaggtgcaattggtccctattgggatagtctgacagaaagtagttttttcactatttttgttttacctgaataccaaggtagagggattggaaaacttattattaatacattggaagacgatgagttttataagagagctagtcggatagagataccagcatcaattactgcagttcctttttatcagaagtttggctataacttcaaggatggagttagtattgctgatgaggaaggtatagtaagaatggagaaaaaactttacgacttaaattaa

SEQ ID NO: 8155 - DNA, 2793 bp, Staphylococcus epidermidis
atggtttatcaaagtgaatatgcattagaaaatgaagtacttcaacaacttgaaaatttaggatatgaacgagtaaacatacataacgttgaacaattacatgataattttcgtactataattaatgaacgtcataaggacaaattaaatggaaaacccctaacagaccgtgagtttgaacgtttaatgacagggattaacggtaagtctgtctttgacagtgcgatgcaattacgcgatagttatgtacttaaacgtgatgatgatactgatttatacctaaatttcatgaacttaaaacaatggtgtcagaataaattccaagtaaccaatcaaatcagtgtgaaagataaatataaaagtcgttatgatgtgacaattttgattaatggcttgccattagcacaaattgagttaaaacgaagtggtgtagcaattaccgaagcttttaatcaaattgaacgttatcgtcgtcaaaactatactggtttattccgatacatacaattatttgttgttagtaataaaatggaaacacgctactatgccaacagtgatcgtgaaattttcaaaggacaaatgttttattggagtaatgaacaaaatgaacgtattaactatcttaaagattttattgaagatttcttagaaccatgtcacattgctaagatgattagtcgttatatggtcgtcaatgaaacagacaaatttctaatggcattacgtccttatcaagtatatgcggttgaagctattttaaatcgtgcgttagaaacaaataacaatggttacatttggcatacaacaggtagtggtaaaacgctgacttcgtttaaagcgagtcaattattatcgcaagaagaaaatattaagaaagtgattttcttagttgatcgtaaggacttagataatcaaaccttagctgaatttaataaattccaagaggactcagttgattttacgaataatacacgtaaattattgaaacaacttgccgatccaactttacctttaattgttacaacgattcaaaaaatggcgaatgcagtgaaatccaatcattcagtaatggaatcgtataaacaagataaagtcatttttattattgatgagtgtcatcgtacacaatttggagatatgcatcgtttgattaagcaacattttgaaaatgcacagtattttggatttacgggtacgccacgttttgaagaaaataagagtcaagatggtcgtgctacagctgacatttttgataagtgtctacatcattatctcattaaagatgctattagggaccataatgtccttggattttccgttgaatacaatcaaacatttaattcacatgaagatttagatgaagaatatatttctaaaattaatacgtcggaaatttggatggcagatgaacgtattgaagctgtttgtcgacatttgatttcaaattatcacaagaaaacagataacggaaattatacatctatgtttgcggttcaaagtattccaatggcgattaaatattatgacacattccaaagactaaaaaacgaaggtgttcatgatttaaatgttgcaactatttttacgtatcaagccaatgaagatgcacaagaggatgacaatcatgttcattcaagagaagttctcgatcgcattatgaatgattataatcaaacatttaaaacgaactataatacggataatttcgaaggctacttttctgacgtatctaagcgtatgaaagaagttgttcgtgatgacaaaattgatattcttatcgtcgttaatatgtttttgactggttttgacagtaagaaactgaataccctttacgttgataaaaacttgaagcatcatgatttaattcaagcctattcaagaacaaatcgtgttgaaaaagaacgtaagccatacggtaatattgtatgttatcgtgatttaaaaaaacaaacggacgaagccattgaaattttctctcaaacagataatacagatacggtgttaagcttatcttacgaagaatacttagataatttcaaagatatcttacaagacgtttttcaactagcgccaacgcctttagatgtcgataaactagaggctgaagatttaaaaaaagagtttgtcatttcattccgtgatttatcaaatacactaattaaactaaaaacctttgatgaatttcaatttacagaagacgaacttggcattgcagaacaaacctatgaagattataaaggtaaatatttaaatatttatgaagaagtcattcgtggtaaaaaattggatggtgaagagggtgtttctgttttagatgatattgatttccaagttgaattaatgcgtaatgatttgattaatgtgaaatatattatggatctcattggtcaaattaatctatctgatgcaaaagcacgcgatgaaaaacgtcatcaaattcataagttgttagataaagcagatgatcaacaattacgtttaaaagctgatctcattcgtagcttcttagataaagttgtgccgtcactaaaagaagattctgatattaatgaagcctattatgaatttgaagacaaagaaaaaacgaaagaaattgatgcatttgcagaacaaaaagccttttctgctatgttacttaacgaagctgttaatgagtatgaatatagtggtaatattgatcgtaaatctatcggtcaaaatatttcagaaccttttatgaaacgtaaaagaaaaaccgaccaaattatacagtttatcgaagatacagtagaaaagtacggtgttatcgaataa

SEQ ID NO: 8156 - DNA, 582 bp, Staphylococcus epidermidis
gtgagtcaaatatctcaattatttacatttcataatggttctttaatcaatcgacttgagaccgtagaagtttctcagggcgtaactttacctatctatgatcaacggatgatggagttcgatgatggagtatttcaaccggcaacacatcaacctaagcatgtaacattaagcacaacacatcaagccaagatggttcatacgggtgacatcgtgattaatatgatgacgagtgagtgtgtgattgtgagtcaacaacatcatgaaagtattcttccttataattatacgcatattgagattgatacaacacacatcgatgccaattattttgtctattggatgaatgcctcagctcaagcgaagagtcagttaaatcaatttaaacaaggaggttcattagttaaaaaactaacactgaatcaacttaaacaacttaagatgactctaccttctttagaacaacaacaacgtatagggaaacttgatgaacgacgtagacacttaaagtatttacaagcgaaacgaacttacttgatggaccaatttttatcagaatatttatttaaggagaagatttag

SEQ ID NO: 8157 - DNA, 1557 bp, Staphylococcus epidermidis
atgtcaacgacggaaaaacaaagacaacagcaagcagaattacaaaagaaattatggagtattgcgaatgatttacgtggaaacatggatgcaagcgaatttagaaattacattttaggactcatcttttaccgttttttatcagaaaaaacagaagaagaagtggctgagttattaaaagaggacaatatttcatatgcagaagcatggaaagatgaagaatatcgtgaagcgttacaacaagagttaatcaatttaattggttttgtgattgaacctcaagatttatttagtcacttaattcagaaaattgaaactcaaacattcgaaattgaagatttacataaagcaatcaataaaatcgaagaatcaacacgtggtgaagatagtgaagaagactttgaccatttattcgctgatatggatttaaattcaacacgtttaggtaataccaatgcagcacgtacgaaacttatttcaaaagtcatggttaatttagctacacttccttttgtgcatagtgatattgaaattgatatgttgggggatgcttatgaatatctcatcggtcaatttgcggctaatgcaggtaaaaaagcaggagagttctatacaccacaacaggtatctaagatattagctaagattgtaacaacaaataaacctaatttaaaaaatgtttatgacccaacatgtggttcaggttcattattgttacgtgttggacgtgaagccgatgttcgcttctattacggtcaagaatataacaatactacattcaacttagcacgaatgaatatgttacttcatgatgtgaactatacacgttttaaaatagataatgatgataccttagaaaatcctgcatttagaggagaaaaatttgatgccgtggttgctaatccgccttatagtgcgaaatggagtgccgatccatcatttttagatgatgaacgttttagcggttatggtaaattagcaccgaagtcaaaagccgactttgccttcattcaacatatgattcattatttagatgataatggcacaatggctgtggttttacctcatggtgtgttattccgtggtgcagctgaaggaacgattcgtaaatatttaattgaagaaaagaactatttagatgcagtgattggtttaccagcaaacctattctttggaacaagtattccaacaagtattcttgtttttaaaaaatgccgtgaagatagtgataatgtattattcattgacgcttctcaatcatttgaaaaaggtaaaaaccaaaatcttctcacggatgaagatgttgataaaatcgtagaaacgtatcgtaatagagaaaccattgataaatttagctatgtagcctctttagatgaaatcaaagacaatgactacaacctaaatatcccaagatatgtcgatacattcgaagaagaagaacccattgacatagaccaagtacaacaagaactaaaagatattgataaagaaattgcgaacgtagaatcagaaatcaatgactatcttaaagaactaggagtgttaaaatatgactga

SEQ ID NO: 8158 - DNA, 1239 bp, Staphylococcus epidermidis
atgactgaacacacaaacactccagaattaagatttccagaatttaatgaagaatggagagaatttaatctaaaagatatctcaacaaaaaaaaataagaaaaataagaataaattatataatgaaacatttactaattcagccgaatatggaatagtatctcaaaaggattattttgataaagaaatttcaaatgtaagaaatttgagtaattactatattgtagatccagacgattttgtatataaccctagaatatcaaggttagcgccagtaggacctattaatagaaataaattaaacagaataggagttatgtctcctttatatacggtgttttcaactaaattatctattaaatcatttctagaatattattttaaaacaacgaaatggcataaatttatgaaattaaatggtgattctggagcgcgttctgataggtttacaataaaacagtctctgtttgtaaaaatgcctatagttcttccaagtaagcaagaacaagagaaaatcggaaaattctttagcaaactcgaccaacaaatcgaattggaagagaagaagttagaattattagagcaacaaaagaaaggatatatgcaaaagattttttctcaagaattaagatttaaagatgaaaatggaaataagtatcctaaatggactaataccttaataaaagatcttttcattaataaaggcggcactgctttagaaaaagaatttgaaaataatggtgattataaagttataagtataggtagttattctatgaatagtacttataatgatcaaaatttaagaataaataaaaatgaaaagactgaaaagtatattttatcacaaggtgatttagcaatggttttgaatgataaaactaaagatggaaatatcattggtagaagtattttcatagataaagataaccactatatttataatcaaaggactgaaaggctaattccactaagtgaaaatgataataaatttttatggtttttaatgaatacagacatagttagaaataaaataaaaagtatgatgcaaggcgcaacacaagtttatataaactactcgtctatcaagaatatatcgcttcaaataccaagttttgaagaacagataaaaataagagaatttttagaaatattattacactcgattactaagcaagataataaagttaaattattaaaacaacgtaagcaaggcttactacaaaagatgtttgtataa

SEQ ID NO: 8159 - DNA, 309 bp, Staphylococcus epidermidis
atgcaattaacaatttatgaattagtcattttaaattcaatgaatattgaggtatacagatatcaaagtgataatagaaaagaagttgaaaataaaattgaagagttaaaagatgactcaggagaagaatataaagttttgacgtgtggtgttatttctactgtaggagaatatactgaaataccagctgatttagaaacgaaacttcaagtagaaaaattaaagttgaatggcactaaaaaaattaaaaataaacctctctcacctagcaatgagagaggttctaattttattaaaataatattataa

SEQ ID NO: 8160 - DNA, 222 bp, Staphylococcus epidermidis
atgaaccatgacactacacaatcagattggcgaacagttggtaacttcttagcaaagcataattatgtatcaatagtaaaaggcctagtacatcacttcacagcgattgaagatgaagaaatattggataatatctatgatgattttatgaatgatgactctttaacaacgatacttaataatgatttacagacaattattaatcattacctatcaaaataa

SEQ ID NO: 8161 - DNA, 471 bp, Staphylococcus epidermidis
atgaatacaatcaaaagtacgatacacacagaagcgatatttagcgatgatgaacaacaccgctacttactcaaaaggacttgggataaaaacaaacccgcatgtacagtgataacgatgtatcctcatttagatggcgtattatcactcgatcttacaacagttcttatcctcaaccaattagcaaattctgaacagtatggtgctgtatatctagtgaatctattctctaatattaaaaccccagagaaccttatgataaacacacagacattcactaagcgaagcgaaacagtgattctaacttatggtgcttatgcgaagcgaccagttgtcgtcgaacgtgttgagcaagtgatggaaatgttgaaatctcataaaaagaaagtcaaaaaacttattaatccatcaacaaatgaaattatgcatccactcaaccctaaagcacgtcaaaaatggacattgaaataa

SEQ ID NO: 8162 - DNA, 303 bp, Staphylococcus epidermidis
atggaaaaatctcgactcaaagcattgtatctatcagtgattgattgcattgatattaaaaaagatggtaatcataaaaaacaattctatgtcacactcaaacttaataacgaaatcattaaacaacttttcaataataaacaactcgacgaagtgcatctcagcacttcgtctttatttttctatcaaacgcttcatcttagtatgtttcttattatgtcatacttttacctgaagaatactaaaggaagtgaatactatgaatacaatcaaaagtacgatacacacagaagcgatatttag

SEQ ID NO: 8163 - DNA, 564 bp, Staphylococcus epidermidis
atgaaaaaatatataatcattgtggcacttttaacatcttttttactaggagcttgcacacttaacattgagcgtaatggtgaaaataatgaaaaaaataaacaacaagagaatactaatacggattcaaataatacaagttcgaatgaatcagataattctaaacaatcatctcaagaaaacactgtaaatcaagcagaacaaaatcaactagcagataataatacaagttcacaacaagatcgacaaataataacagaaaatgaagctatccaaaaagtaaaagagaagttcccttctatacaaacaggaaacgtctatcgtatagatactactagaactgacaataatgtttatgctatcaaatttatttcgcaagatgcggaaggttatcctatgaaagctgctgtaactattgataagcgaactggagagtttattgattatattgatgatagaagcgatgaagataaagagcgtcatgttcaacatgctaaagaaagtcccctatataaagggtcatatgaaactttcagaaaagactttagtcataaaatagattaa

SEQ ID NO: 8164 - DNA, 780 bp, Staphylococcus epidermidis
atgaaacattcgaaaaagttacttttatgcgtaagttttttattaataacggtttttattggcggatgtggatttatgaataaagacgatagtaaagaaacggaaatcaaaaaaagttttaataagacgttaagtatgtatcctattaaaaacttagaagatttgtacgataaagaaggttatcgagatgaagaatttgataaagatgataaagggacgtggttactttactcggaaatggctatacaacgtaaaggagaagatttagaaactagaggtatggtgttaaaaataaatagaaatacacaaacatctaaaggtgattatataaccaataaatttacatacgataataaaggaagacctcaaaataataagaaaaaatatccagtcaaaatggaaaataataaaataatccatattaaaaaattgaagataagtaagataaagagggaaatagatgaatttaaattcttcgctcaatatgcaaattttaaagaactaaaagattataagaatggaaatatatcatacaatcccaatgtacctagttactctgcagaatatgatttagaaaatagcgattataatgtaaaacaattaagggaaagatatgatattccaacaaaacaagaaccaaagttattattgaaaggtacaggtgacttaaaaggttcttcaattggtacgaaagatgtagaatttacctttattgaagacaagaaagagaacatttatttttctgatagtatgaactttatgccaagcgaggatgattaa

SEQ ID NO: 8165 - DNA, 858 bp, Staphylococcus epidermidis
atgattgaacttaacaaatttataaaagtaccaaatttaaataaaactaaaataaagtttaatatgaatgcaggaaatgttgaaataaaagcttgggatttactttttaaagaagatgaaactgaatgggaacaaattaatgcatggaaaacgaaacatccaaataacaatttgaatcatgcagattacctactagcttttgcgcaatattatccctatggtccagaatattttgtttttgggggattatataaaattaaaaagattgaacctgaagtttatgatgaggtaggttatgaattaactttaatggaagattataaggaatatagaaaaagacttatcgttaaattaaaaaaacctataggtagagatttatataatagattatataaaaatattcaagatactttagaacctgaggtttatgaaattgctcctaatactaaattaggacattttcctggttatcagaatgtaacgttatcccacccacaaatgcaacaaattatatcaagaaatgaacctagttggaaacaagctttaatgaatgtaaaaggtgtttatgttataaccgacttaagtaatggcaaattatacataggatcagcatcaggtaatacagatggaatatggcaacgatggtcggactatgccaatatagaaaatctaacaggtggtaataaattattaaatgaaattaaattagataaagggaaagattacatcgtaaataattttcaatattcaattttagagatttttgatacaaagactaaagcagacattataatcaatagagaaaattattggaagaatgtattttgcactagaaaatatggtatgaactataactaa

SEQ ID NO: 8166 - DNA, 699 bp, Staphylococcus epidermidis
atgaataaagacgagagtaaagaaacggaaatcaaaaaaagttttaataaaacgttaagtatgtatcctattaaaaacttagaagatctatacgataaagaaggatatcgagacgaagaatttaataaaggcgataaagaaatgtggatagttcactctgaaatgaatatacaaaaaaaggggaaagcattggaatcaagagggatggttttatatatggatagaaatacaagaaccactcacggctattttattcttaccaaaataaaagatacaggtaaagtcaaaacagatgacagtgaaaagaaatatccagtaaagctagaaaataataaaataattccaacaaaacaaattaaagatgaaaagttaaaaaaagaaatagaaaactttaagtttttctcacaatatggcaattttaaagatttaaaagattataaagacggtgaggtatcttataatcctaatgcgcctaattattcagctaaatatcaactcagtaataatgattataatgtaaaacaaataagaaaaagatatgatattccaaccgaacaagcccctaagttgttattaaaaggtacaggtgatttaaaaggttcatccacaggttctaaaaatattgaatttacttttgtagagaaaaaaggagaaaatatttattttactgacagtgttgaatacacgccaagcgagtaa

SEQ ID NO: 8167 - DNA, 609 bp, Staphylococcus epidermidis
atgtatatcaaaaatacaaatgtacatgaagtttactttaaaaataaagttttactagtcaacttaaacaatggacaatgggtaagaacaagtagaaaatattttgaagttttaaacaaattggttgaatctaatcaaattggagattttatgaagtataaatatgtaagtaatgtgatagataacttaaagcggctttttaacgaattgcttgaaatacgatactacgtagatgaagaaaaaactcatcaagaaaataatttaagtgtgacttttactcttacaaataaatgcaatctttcttgtagtcattgtgctctatctgcttctcctttatcacaagatattttaagtacaaatgatgttaaatatgcaattgataagattattgacgtcaacccgaatacgcttattctaactggcggagaaccctttattagaaaagatatattagaaattatttcctatataagaactaactttaagaataagttggtgattatgactaacggtatgttaatcagaaaaaattcatttcattttaaaaaaagaatcggatacgtcaataagtgcgaaatggcatccttacgtgtgcacatggcgtcgtag

SEQ ID NO: 8168 - DNA, 906 bp, Staphylococcus epidermidis
atgaatgaaatagttatcaaaggtttgagtaaatcatatgatggaaagaaagatgcgcttaattcattggatttagtaattcccaatggtatgtttggtattttaggaagaaacggatctggtaaatctacattaatgaatattattgcaacaattcttcaaccaagtaagggaacagtaacaattaatggtattgaaattaagaattcacaaaagattagacaaatgattggttacttacctcaagattttgatttttatcctaatatgaaagtctcggaagttttatactatttaggttttttatctaaaataaatcaaacggatttcgataaatatgtagatttaattcttcgtaaggttaatctaattgattataaaaataaaaaggttaaaagtttatctggtggaatgaaaaaaagattaggtatagcgcaagccattttacatgaccccaaagtaattattgtcgatgaaccaacggcgggattagatccagaagaaagagtaaggctacgcaatttactatctgatttagctgaaaacaaaattgtgattatatcaactcacattgtgagcgacattgaatcaacttgtaataggattgctattttagataaaggaagtcttgtatataaaggtgacataccatcgttgatacaacaaagtgatgattatatttatgaaatcaatctatccccatcggaattagaatcatttagagaaaatgacttatttattactaaaactcaagaaattgaaaataaattaaaagttaggtttatttctgaaacaaaagttgcaaacgctaaaaaagttaaagctgattttgaagatgcttatatgtattttttaaagaaacaacaaggaggtttgaatcatgcgtctatttataatggaatttaa

SEQ ID NO: 8169 - DNA, 1122 bp, Staphylococcus epidermidis
atgcgtctatttataatggaatttaaacatttaatggttagtaagacatttctattttattgtttattgattattatattcacggtattgaattgtcaacaagtcctcaaacatcctattaattcagatgtatatcaacctcaaaatatgattatgtattctactgataaaaacataataatgtcaaatgaaattaaagaattaaagaacgaagtacatcaaaataactttaaaacgtatcaatttggatttttaaagcaaaaaaagttaaatgaccaacaaatttctaaaataaagaaactaatatcaaaaatggaaaaaacgaataattttcatcagtttaaaaattattctaatagcgtatcacatgttgttggatggggatctcaatattctaaaaataatatctcattatttggaattaagaatatgagtaagagcaagtatgttaaagagaagaatattataaaaaataaagagtactattatggagcatatagtagatatttttcagatattattggggtagtgttaggaatacttccattctttttgggagctcaaatgattcttcaagacaaaaaaagtaatgccattaaaacgattcattctaaatctatatcatcataccaattaatttctacacgtgtatttactattcttgttttggcatatttaccagtattattagtatcaatatattttgttacttgtttatcgatgatacatcagatatcgatgttttctttatttattttttataaaattttaatcttgtggacattacccactctaatatttactatcgcgatgggattgtttgtcacaattatattgaattcttatttaggtgtaatgatacaaatagtaatttggtttatcaatttaaatataggttctcgtgccattgaggggtgctatagttctctattgattcctcgacataatactttatttaacgcagtttttttctataatcacttcaatcaaattttagctaatagatttacatactttggcttaggtttacttttaattctacttagtacatatatatttgacctgaaaagaagaggggtaggttttaatggcaaaatttttactaatagatatcaaaactaa

SEQ ID NO: 8170 - DNA, 612 bp, Staphylococcus epidermidis
atggcaaaatttttactaatagatatcaaaactaatttagtcaaactttacataggaattttaattctattatttggtggaatgtttatttttggtgtatctaatcttaatcatgagagtgttacacaatatattgagttaatatttactatactaggcatattgttatttactgctatctattctgtagatcaaaacaagaaatctaagttaactattggtgcaaagtgtcatgactaccaattcgtatttatgcttagattagtgataacaatcatctatatactgttcctaattacaatcaatttatttatatttcatttatttaactcaaatatcattgttttgagggatatgtttattgctttaaccagtactttatttataggatcaatatgtttattaacaagtattcttagtggtaatacattaaatggcttaatgtttggacttgtatatttcttattctgcttaggatttagaaatctaggctttatgtatttattctcagaaacctttaactttccattttatataaaaatatttcaatttttattaggaattgtattattaatttttagttacactattatcaaaaaagtacaaaattaa

SEQ ID NO: 8171 - DNA, 666 bp, Staphylococcus epidermidis
atgtataacataatgattgtcgacgatgaagaaaaaattgtgtcatttataaaagaaagtttatacttagaaggttttaacactattgtcgcttataatggacgtgacgttttaaaacaaatcgatgacaaaattgatttaatcattttagatattaaaatgccatatatagatgggtttgaagttgctcaatcacttaaagagagtaatatacctattatttttcttactgctaaagataatcttgatactagactgaaatgtttctcgcttggtgcaaaggattacttacctaagcctttctatatggaagaacttataattcgaattaaaaatgtacttaatcaaagtcattctcaaagtttgactcccaatataaaaaaaactaaagaattaatcatttattatgatacatatagaattgatgtaaataacatgacgatagatattacaaaaaaggaatttgaaattataaaattactatctttaaatcctcaatattatttcagtaaagaacagatatatgattcgattaatttaaataagacaggcaatactcaagttgtggctgaacatatacgtaaaataagaaaaaagttaagttgttatagtcgttttgaatacatcgatacaaagtggggagttggatataaatggctagagtag

SEQ ID NO: 8172 - DNA, 1092 bp, Staphylococcus epidermidis
atggctagagtagaaagtttaaaaagaaaaatgacacgtcttatcatagcaattatagttgtcagtgttggattagtatttttactacaaattttgcttaatgtattagaattttcaaattttggaaagtctttatacactaatttttggaaacaaccacattacattttctcttttactagcgcatgtatcagtattatgactcctttgttaatcatttacgtgttcacacagtttttttataaaaagtacattacaactagtattaattatcttaatgatacgattcaaggattaaaaaataaccgcactgatgttgaatataagaaaatgagtatttcagaattcaataaagtgattcaagaagttgagcatatacatacttatcttgctaatagtattaaagatcaattatctattcaaaataattttaaaagaaaactcgaaattttagagcatgatttaaaaaccccgttaaccgtccttcaaggtcatattgaattattaagaaagattaattgttctaatctgtctcaggaggaaatacattttaaaataaacagggaagcagacattgcgttacaatctattgatagaataaataatcaattacaaatacatattaaaaacatcaacttattgccaaaccattcagatacaattcatgttgataaggtaataaaaatcattaaagagagctataatcaacaatacatattaaaggagagagaactgattattgatgttgatcatgatttcccctattataccttaagcattaacaatcaagttctataccacgtcatcgataatctaattaataacgccttgaaatatgctgaaaaacaaatatctataaagtttgaagttatcaacgaccatttactaaacttcaccataaccaatgatggaagaatatttactgaagatgaattgaattctgccaaagagtggggaacaaaaggtaaagaatcaaatgggtctggtattggtctatattttgctaatattgtgcttcaacaatataatagtgaacttattttagaaaatgagaataatcacgcaaaagtaagtttcaatattcctgtttaa

SEQ ID NO: 8173 - DNA, 1362 bp, Staphylococcus epidermidis
atgaatgatacagatagaacacataaggaaaacaagttagagcaagatattacactaccttatttaaaaaaagcagttattttttcaattacttttggtttctttggtgtaaatatggcttttgcacttcaatcagcaatgatggggagaatattccaaacgttaggagctaatcctaataatttaggatggttttttattttgccacctttagtaggaatgattgttcaaccccttattggatactactctgacagaacttggaccagatttggacgtcgtatgccgtatctgttaatagctggtccgattggagcaatcgtattagtcttattacctaatgcaggctcatttggatttggatatgcttcactcatggctttatcctttggtgcggttatgactttacttatggatttgacttcaaatgcatgtatgcaaccatacaaaatgattattggcgatatggtaaacgaaaaacaaagagatatggcatggtcttggcaacaaattttttcaaatttaggtggtattattgctacagtattaccatttttattaacaatgttgggaataagtaatgtagcacctaaaggtgaagtaccaatgactgtaaaattagcttattatattgcagcagcagtattattaattgcttctatatggacagttatctccgttagagaatatgagcctaaaacgtataattattatcatggaatcaatgagaacaatagaaataataaattaaacttattacagttattaaaaaaagcccctaaacaattttggcaaattagcgtagttcaattttttaactggtttgcattgatgtatctttggacatattcaacaggtgcaatagcaaagaatgtttggaatgtgacagacccttcttcagccggatatcaagcagcgggaaattggtacggcgtattatactgtatacaatttttgagctcagttatttttggttttgtcattgcaagatctaaaccatcccaaagaaaattttggtatagctttggattggttttcggtggaataggtcttatttcaatattctttatccataatcaatggttactcattttttcttttgtattgattggtattaataatttaacgatgaatacacaaccatttacattattaactgaggcaatcgatggagaaaattcaggggcatatctaggtttatttaatacaagtatttgtctaccacaaattgtagcgtctatagtcagttttggactgtatccattattgggaagttcaatgcctgcgatgctactgcttgcaggaatcatgatgcttttaggtgcagtttcagttaaatttattaatgcaaaatttgaatag

SEQ ID NO: 8174 - DNA, 486 bp, Staphylococcus epidermidis
atgaaaaaagtttctaaatttattttagctagtagtttaattttgggcttttccgtaacgcccgaattatttaatgtcactcaagcacatgcgcaagaatctgtgaaaccttattataattatagtggttatacagcacatcaaagtaactttattctagataagaattttaaaacatctttaaaagctgataacttcaagattaatggttacaagattactcaaaacgaatcagctaaaaatgataaagatgtatatgatcaaacatattacggggtttctaatcataaagcgaatggtgttttcttctcattagacggtaagtcagtgagcgaaaaagaattattgaatcattacggtgaaccaaagtctacatctacatcagcatggggcaaagaatatacgtataaaattggaaataaagatgtaagattttatgttaatcaaaaaggttatgtcattaaaggacaaatcattagtgagtag

SEQ ID NO: 8175 - DNA, 1662 bp, Staphylococcus epidermidis
atgaatataatcgatcaggttaaacagacgctaatagaagaaatagaagctagtattagaaaagctaacctcgcagaagatattccagaaattaaaattgaaatacctaaagatactaaaaatggagattattcttctaatattgctatggttttaacaaaaattgctaagcgtaatccacgtgaaattgcgcaagctattgtcgatcatttagatacaagcaaagcacacgttaaacaggttgatattgctgggccaggtttcatcaacttttatctggataatcaatatttaacagacattattccagaagctatcacaaaaggtgatcgatttggatatgcaacacaatctaagaatactaacattttattagaatatgtatcagctaatccaacaggagacttacatattggtcatgctaggaatgcagctgtaggcgattctttagctaatattctcattgcggctggttacaatgttacacgtgaatattatattaatgacgcaggtaatcaaatcactaatttagcacgatcaattgaagcacgatacttcgaagctttaggtgatacgagttatgagatgccggcagacggttataatggtaaagacattattgaaatcggtaaagatctcgctgttaaacatccagaaataaaagactactctgatgaagaacgcttaaaaacgtttagacaacttggtgtcgattatgaaatggaaaaattaaaaaaggatttatctgattttaacgtgcactttgataattggtttagcgaaacatctttatatgaaaatggcgcgattaaaaatacattatctaaaatgaaagagctaggctatacgtatgaagcagatggcgcgacttggttacgtacaagtgactttaaagacgataaagatcgtgtattaataaaaaaagacggtaattacacttatttcacaccagatacggcctatcactacaataagattaatagaggaaatgatattttaattgatttaatgggtgctgatcaccacggttatattaaccgtctcaaagctagcttagaaacatttggtgtagacagcgatcgtcttgaaattcaaattatgcaaatggttcgccttatgcaaaacggagaagaagtgaagatgagtaagcgtacaggcaatgcgattactttacgtgaaattatggatgaagtcggtatcgatgctgcacgttatttcttaacaatgcgtagtcctgattctcattttgactttgatttagagttagctaaagagcaatctcaagacaatccaatttattacgcacaatatgcacatgcacgaatttgttctattctaaagcaagctaaagaacaaggtattgaagtgtctactgatgcagacttttctaaaataaataatgataaagcaatagacttattaaaaaaagtagcagaattcgaatcgacgatagagagtgcagccgaacatcgtgcacctcatcgtctaactaattatattcaggatctagctgcagcattccataaattttataatgctgaaaaagtgcttacagatgatacggaaaaaactaaagcacatgtagctatgattgaagcggtgcgtattaccttgcacaatgcattagcattagtaggtgttacagcaccagaatctatgtaa

SEQ ID NO: 8176 - DNA, 417 bp, Staphylococcus epidermidis
ttgaataaaaatattaacattcaaacccgtcaagttttgaaacagaatggtgaaaagcagagatttgagtttactacaaaaggttcttggcaacaaaaatttgcagattttatacgttacgaagaacaaattgaagatgctaaagttaatgttacgattaaaattgaagatagcggtgtaaagttaattcgtaaaggcgacattaatatgaacttacatttcgtcgaaggacatgagacgacaacactctatgatgtacctaccggaaaaatacctttaactgttaaaacactaagccttatgcatttcgttactcataatggcggtaaacttaaaatacattatgagttatatcaagatgaacaaaagatgggttcttatcaatatgaaataaattataaggagataagcgaatga

SEQ ID NO: 8177 - DNA, 390 bp, Staphylococcus epidermidis
atgcgatttaaattaaaagaagatgaaattttagaatttttagatttaaattttccacaacaaacatttgaaaaaggtcgtctccttattgggcaaaataagagacaaccattacacgtttattattttggaaaaaaattcttggctcttttaaatgtaaattttaacacttttgaatatattaaagtagatgaagtcgattataatgatataaaaaaatcacttaagacggactgctttttaaaaaaatgtttattgagaacagaggattttatgtttaactatagtacatctaaagctcttttaagtgattttcaaaataataattttaattactttattcaaaataaaaaagagcgtgttatatttgaagatgggcatttcctctaa

SEQ ID NO: 8178 - DNA, 1023 bp, Staphylococcus epidermidis
atgaaagcagctgtagtaaccaaagatcatagagtaagtattgaagaaaaacgtttaagagaattaagacctggagaagcattagtaaagactgaatattgtggtgtatgtcatactgatttacatgttaaaaatgcagatttcggtgacgtaacaggtgtaacattaggacatgaaggaattggacgtgtcattaaaattgctgataacgtagattcattaaaggtaggggatcgtgtatctatagcatggatgtatgcagcatgtggtaattgtgagtattgcacaactggtagagaaacattatgcagggatgtccttaatgccggatatactgttgatggggcaatggctgaagaagtcattgttgatgcgaattatgcagttaaagttcccgaaaatcttgatccagcggctgcttcatctattacctgtgcaggtgtgacaacatataaagcagtaaaagtgagtggtatcgaaccaggacaatggttaggcgtatttggtgtgggaggattaggtaatttagcattgcaatacgccaaaaacgtaatgggcgcgaaagtcgttgcatttgacattaatgatgataaattaaattttgctaaagagcttggtgctgatgcaatcataaattcaactaatgttgatcctattgaggaagttaatcgtctaacgaataataaaggattagatgcaacggtgattactgctgtagctaaaacaccttttaatcaagcagttgatgttgttaaggcgggtgcacgtgtggtagcagtaggacttccagtagataaaatggatttagatattccacgtttagtgcttgatggaattgaagtcgttggttcattagttggtaccagacaagatttaagagaagcatttcaatttgctgccgaaaataaagttattcctaaaatccaattaagacaattatctgaaattaacgatatttttgatgaaatggaaaaaggaacaattacgggtcgaatggtaattgatatgaaaagcacgcactga

SEQ ID NO: 8179 - DNA, 1269 bp, Staphylococcus epidermidis
gtgaagacgcaagttttgtacggaaaatctgaaattgaaatcaatgtgcctgatgatagcacaatcatagagcctcaaaacatcgacgctattcaagattatgaatcaacaattaaaaatgtattaagaaaccccacaaattctaaacctttaaaagaaatggtaaacagtaatgatattgtttctattgttattagtgatattacacgtccaacgcccaaccatattcttgtacctttactaattgaggaattaaatcatgttcctcgtgagaatttcgtaattattaatggtacagggactcatcgagatcaaacgcgagatgaattgattcaaatgttaggtgaagatattgtaaattcagtaaaaatcgttcacaatcattgctcagaaaaagaaagtctagctaaagtgggacacagtcaatatggatgtgatgtttatttaaacaaagcatatgtagaatccgattttaaaattgtaacaggttttattgaaccacactttttcgccggattttcaggtggacctaaagggataatgcctggaattgcaggtttagaaacaattcaaacatttcataatgcaaaaatgattggcgatccgagatcaacgtggggaaatttagaagacaatccagttcaagatatggcacgggaagttaaccgtatgtgtaaacctgactttttacttaatgttgcattgaataaaagtaaagaaattactgcagcatttgctggtgaaatcttagatacacacaaagaaggatgcgcatatgtaaaagatcatgcaatgtttaaatgtgagcaacgctttgatattgttatcgcatcaaattctggctatcctttagatcaaaatttatatcaaacagttaaagggatgagtgcagcgagtaaagttgttaaaaaagacggtcatattattatggtatctgagtgtgcagatggctttcctgatcatggtaagtttgccgaaattttcaaaatggcagacacacctcaaggtattttagaacttattcacaatccaaactttaaggaagttgaccaatggcaagtacaaaaacaagcaagtattcaaacttttgccaatgtgcatgtttattcagaacttactgaccaacaacttaaagactcgatgttaatcccaacctctaacattgaacatacaatacaagaattagaacatcgatatggccgtaaattaaccattggtgttatgccacaaggtcctttaacaataccgtacgtagaagataaagaataa

SEQ ID NO: 8180 - DNA, 828 bp, Staphylococcus epidermidis
atgactgaattaaatactaaagaaatgaaattagacgcactattgaaagacatgcagagtgtagtaattgccttctcaggtggagtagatagtagcttgttactgaaaaaagcgattgatattttaggtgttaactatgttaaacctgttgtagtaaaatcagaattatttagaaatgaagagtttgaactagcgcttaaacttggacaaagtctaggtgttgaagtattagaaactgaaatgtctgaacttcaagatgcgaatatcgttaaaaatacgcctgaaagttggtactatagcaagcgcttgatgtatagtcaacttgagaatattaagaataaactaggatttaattatgtgctagatggtatgattatggatgacttagatgattttcgtcccggattaaaagcaagagacgactttggtgttcgtagcgttttacaagaagcaaaactatataaatctgaagttagagaattaagtcatcaacatgacttgcctgtatggaataaaccagccttatgtagtctagcatcaagaataccttatggtgaggaattaagttttacaaaagttaacaaggtcaacgaagcagaaaaattcattttaagcctaggtattaaccacgtacgagtacgctatcatcacaacatagcacgcattgaagtaacagaagatcaattaaataatcttcttaaattgaaagacagtatcatattacatttgaaagaattaggatttgactatgtaacaatggatttagaaggctatcgtacaggtagtatgaatgaaatcattgataccaaatctacaagttttaaataa

SEQ ID NO: 8181 - DNA, 777 bp, Staphylococcus epidermidis
atgagccatagttataattctatagaagaggtgctcaaagctgtaaaatcaaatcaactatctattaatgatgctaaagcccaactcagtcattatgacgaattgggctttgctaaaattgacttacatagagcacagcgtcaaggatttcccgaagttatctttgggcaaggaaaaacaaaagaacaaatcactaaaatcatctctagtttgatatttcataatgaagttattctagtgacacgtgttgatgaaatgaaagcaaaatacattttacaacattatccaaacttggaatatcatcaaactgcacagttaattagcactccactaaaagatataccacaatctaaatactatgtttctgtactttgtgctggaacttctgatttacctattgcagaagaagctgcattaaccgctgaaatcatgggagtaagtgtaaaacgattttatgatgtcggggtttcaggtattcatcgcttattatccaacattcatgatatacgcagagggaaagtttctatcgttatagctggaatggaaggcgctttagcaagtgttgttggaggattagtcaaccaccctgtatatgcagtaccaacgagtgtaggttatggagcaaacttgaatggggttaccaccctattatcaatgataaatagttgcgcacccggaaccagcgtattaaatatcaataatggatttggtggcggttacaacgctgcacagattattcatatgctagaaaataaagagagtgaggtatctttatga

SEQ ID NO: 8182 - DNA, 1188 bp, Staphylococcus epidermidis
atgacaaaagcattatatttagattgccacgcaggtattgccggagatatgctactttctgctttagttgatttaggagcaaaccctgaagacattgaatcagaactaaaaaaattacctttagatcaatttaagctacattttcaaaaaagagtaaaacaaggtattcatgcaatgacattaaacattgatgttaaagaagcaaatcatcatcgtcacgttaatgatatatttaaaatgatagatgacagtacacttccggaaagggttaaatatcgcagtaagaaaatttttgaaatcattggtcaagcagaagctaaaattcatggcatgtcgtttgaagaagttcactttcatgaagtgggggcaatggactctattatagatattattggtgggtgtattgcactagaacaactagggattaacacattatactgttcagctattccaacaggtcatggtaaaatcaatattgctcatggcatttatccaatccctgcaccagctactgctgaaattcttaaaggtataccaatcgcacattttgatgttcaaagtgaactcacaacccctactggtgctgcatttgctaagggacttgtttcatcgtttgggccatttccttcagcaacaatacaacatataggctatggcgccggcagtaaggattttgatttccctaatatattaagggttattcaatttgaatctgaattcgagcaacaagatagcgtccaagtaatagagtgtcaaatagatgatatgacacctgaagcattaggttattttatgaataatgcgttagagcaaggtgctttagatgcttactatacgcctatatttatgaaaaaaagtcgcccaagcacgcagttaacgttaatatgtaaattacatgataagacatatttcgaacaacttatcttacaagaaacaagttctttaggcgtcagaagtacttctgttaatagaaagaccttgaaccgcgcattcaaaattctttctacacaacacggcactgtttccattaaatttggcctacaaaatggaaaaattatgaaaatgaaacccgagtatgaagatttgaagaaaatagctaaaactacaaaacaaccgtttcaagtaattcataacgaggtattacaacaactctatcaaacatatcatataggaaatatacttcaataa

SEQ ID NO: 8183 - DNA, 507 bp, Staphylococcus epidermidis
ttgtctgagaaaaaaggtttcaatttcaatattataaaaaatgatccactagatggtcataaaggaaccaatattggttcgattagtttagataatattgccccggtttttatagatgttgaaaatcagaaggcatttgttgatattggtggtatgcacgcacgtgctgaagttgaaaagggtgtcaagtggattactgacaaatcacaagttgaaggtgaggaggctaaagcatactggctatgttgggtgacgactgaacgtagtgaagaagggccatattatgcgggtgtgactgcatgctatttattagttaacaaaagtattagacgtggttataagagcatgccagaacatgttaatatgatggataagtctatgaaacatcaatttatcatcgaccaaatcggtgatgataacaaacaaattttaaaagaatttctacaaaatcataacgttgaaatgtggaataattctagtgaagaactatatcgagcatttgaatag

SEQ ID NO: 8184 - DNA, 1299 bp, Staphylococcus epidermidis
atgacgctatcatcatatgcaacgagtaaattaacagaagaaaaggtatttaaagatccaattcatcgatttatccacgtacaggatcaattgatttgggacttaattaaaacaaaagaattccaacgcttgagacgtattaaacaactaggtactttgtatttatcatttcatacagccgaacatagtcgttttggacactctttgggtgtttatgaaattgtgcgccgaatgattgatgagacatttataggacaagacgcgtgggataatactgatcggccacttgcgttgtgtgctgcgttgttacatgatttaggtcatggtcctttctctcatagttttgaaaaaatatttaatacagaccatgaagcatttacacaagctattatcacaggagacactgaggttaatggtgtactaagtcgagtctctgataactttcctaaacaagtagctgatgtaattaataaaacgcacgataataagcttgttatttctatgatttcctcacaaattgatgctgatcgaatggactatttacaaagagatgcatattttacaggcgtaacgtatggctcatttgatatggagcgtattttaaggttgatgagaccatctaaagaagaagtgttaattaaagatagtggtatgcatgctgtcgaaaattttattatgagtcgttatcaaatgtattggcaaatatattttcatccagtaagccgtggtggggaagttttattaaacaattgtttaaaacgagctaagcagctttataatgaaggatatgaatttaaaatgtatccaaaagactttataccattctttgaaggaacaatgacgattgaacaatatgtagaacttgatgaagcagttgtattgtattacttgaagaaatggattcatgaaaatgatacaatattaagtgatttatcaagacggtttatcaatcgagatttatttaaatatattcctttcgacggttcaattattaccatttcggaattgcaagaattatttgaagcgggtggtattaatcctgattattactttgtaagtgaagcattttcagatttaccttatgattatgatcgcccaggctcaaatcgcaaaccgattcatttattaaaaagtaatggtggaattacagaaataagtaatcaatcattggtgattaatagtattacagggattaatagagaagaccataaattatattatcctaaagagatgattttaaaaattaaagattatcaaattaaaggttctattattaacttacttaatgaattaaattaa

SEQ ID NO: 8185 - DNA, 477 bp, Staphylococcus epidermidis
atgtatagtgtcagacaagcaactgaaaaagatgttgtagcgataagagatgttgcgacaaaagcttggtataacacatatttaaatatttatgctgcttcaacagttaatgaactgttggccgcttcatataatgaaacgcatttaaaaaagagactaaatgagcaattatttttagtggcagaagaagatagtgagattgttggttttgcaaatttcatttatggtgaagagctttatttatctgcacactatgttagacctgaatctcaacatagaggttatggaactcgtttgctagaagcggggttgaaaaggtttaaagaccagtatgaaacagtttatttagaagttgataacaataatagtaatggcatcgaatattatcaaaatcatggattcgagattattcgctcatatcaacctgaaatgtatggtgaaatcatggatttagctttaatgaagaaatcattttaa

SEQ ID NO: 8186 - DNA, 939 bp, Staphylococcus epidermidis
atggtaaatcaagtacaattaggtaaatctagtgtcaacgtttttcctatcgcattaggtacaaatgcagtaggtggccataatttatatcctaatttggatgaagagcaaggcaaagaagttgttcgtcaagctattgataatggtataacattattagatacagcatatatttacgggcccgaacgttccgaagaattagttggacaagttgtaaaagaatatccacgcgagaaagtgcaaattgcaacaaaaggttcacatgttattaaagaaaatggagaagttgttcaaaataacgatccagaatttttaaaacagcaagttgaaaatagtttggaacgtcttcaagtggattatattgatttgtattatattcattttcctgatgacgatacaccaaaagataaagcggtagccgctctcaaagagcttaaagatgaaggtaaaattaaagcaataggtgtatctaatttctctttagaacaattaaaagaagcgaataaagatggatatgttgatgttgttcaattagaatacaatttattacatcgtgaaaatgaagaagtaatggcatatgctgctgaaaataatattacatttgttccttacttcccacttgcttcaggtatactagctggcaagtacgatgaaaatcaaacatttgaggatcatcgtgcagaacgtcctgattttcagccagacgtattcaaagataatgttcgtcgtgtaaaagcattaactgatattgcagaagcacatgatacaacgattgccaatgtcgtattagcattttatcttacacgtccatcactagatgttgtcattcctggtgcaaaacgtgcagagcaagttgttgaaaatattgatgctgcaaatattgaattatcacaaggtgaaatagacaaaattgatagtttattctcaattaaaaattaa

SEQ ID NO: 8187 - DNA, 423 bp, Staphylococcus epidermidis; identical to SEQ ID NO: 6523

SEQ ID NO: 8188 - DNA, 1332 bp, Staphylococcus epidermidis
atgaaaaattatgatttgattattattggttttggaaaagcaggtaaaacattagcggcacatgctgctggtcatggacaaaaggttgcagtggtagaacaatcaacaaagatgtatggtggtacatgcattaatatcggatgtatacctactaaaacattaattcatgatggtattgaaggtaattcattcaaagagtctattactagaaaaaaagaagtcgtacaagcattgaataacaagaactatcaaggcttaaattcaaagaacaatatagatgttctaaattataacgccaaatttatttctaacgagataatagaactacaggatagtaatggaacaattcaagaaacaattaccgcagataagatattaatcaacactggttcacgtgcgaatatcccagatatcaaagggatagatacagctcaaaatatatatgattctacaggattactaaatattgactatcaacctcaagaacttgttattattggtggcggttatatcgctctcgaattcgcttcaatgtttgcaaattttggaacacatgtaacaattcttgagcgtggtgatgctatcatgacaaatgaagatcaagacattgcaaatcttattgtcaaagatttacaagataaaggtgtgactataaacactaatactagcactattgcattttcaaacaataaagatcaaactatcatacacacaaatcatggagaaatatcagctgatactgtgctcttagccacaggtcgtaagccaaatacaaatcacttaggtcttgaaaatacagatgtaaaaattggaaaacaaggtgaagtgattgtaaataaacatttgcaaagtacagtgaaacacatatacgctgcaggtgacgttaaaggtggattgcaatttacgtatatttcactcgatgattatagaatcattaaatcgcatctatttggtgatggttctagaacaactgaaaatcgtggcgcaataccttatactgtctttattgaccctcccctatctagagtaggactaattgcaagtgaggctaagttacaaggatacgatattctagacaataaagtctttgtcagtaacataccccgtcataaaatcaataatgattccagaggtttatttaaagcagtgattaataaagatacaaaagaaattttaggagcgtcattatatggcaaagaatcagaagaactgattaacttaatcaaacttgctatagatcaacatattccttacacagtattaagagataatatatacacacatccgacaatgaccgaatcctttaatgacttgtttttagaaccactttga

SEQ ID NO: 8189 - DNA, 342 bp, Staphylococcus epidermidis
atgaaaaataaatttttaatctgtgatgagtgtcaggctgtaaatttaaagtctttgaagcgaaaattagaaaaattagatccggaagctgaaattgaaataggctgtcaatcttattgtggaccaggtcgacgtaaaacatttgcatttgtcaataatcgaccacttgctgcgttaaccgaagaagaacttatggaaaaggttacaaaacaattaaaaaaaccacgtgatccagaagaagaagagcgactaagaaaacgtaacgaagaacgaaaacgtcgtaaagaagaacaagatcgcaaacttaaggaaaagttaaagaagcgcaaagcagagaaataa

SEQ ID NO: 8190 - DNA, 1077 bp, Staphylococcus epidermidis
atgattcaggtaaaagcccccggaaaactttatattgcaggcgagtatgcagtaaccgaaccaggatataaatctattcttattgcagtaaatcgctttgtaacggcgacaattgaggcgtcaaataaagttgaaggtagtattcattccaaaacattacattatgaaccagttaaatttgaccgtaatgaagatagaattgaaatctcagatgttcaagctgctaagcaactgaaatatgttgtgacagctatagaagtgtttgaacagtatgtgcgcagttgcaatatgaatttaaagcactttcatttaaccattgatagtaacttagcagataactctggtcagaagtacggattaggttcaagcgccgctgttttagtatctgttgttaaagctttgaatgaattctatggtttggaattatcaaacctttatatttataaattagctgtaattgcaaatatgaaattacaaagtttaagttcatgtggcgatattgcggttagtgtctacagtggttggcttgcatatagtacgtttgaccatgactgggtgaaacagcaaatggaagaaacatcggtgaatgatgttttggaaaaaaattggccaggcttacatatcgaacctttacaagctcccgaaaatatggaagtccttattggatggactgggtctccagcttcttctccacacttagtgagtgaggtcaaacgtttaaaatcagatccaagtttttatggtgattttttagatcaatctcatgcttgtgtagaaagtttaatccaagcttttaaaactaataatatcaaaggtgttcaaaagatgatacgtataaacagacgtattattcaatctatggataacgaagcatcagttgaaattgaaacagataagctaaaaaaattatgtgatgtcggtgaaaagcacggtggcgcttctaaaacttcaggtgctggtggtggcgattgtggcattactattatcaacaaggtaattgataaaaatattatttataacgaatggcaaatgaatgatatcaaaccattgaaatttaaaatttatcacgggcaataa

SEQ ID NO: 8191 - DNA, 984 bp, Staphylococcus epidermidis
ttggtgaaaagtggcaaagcacgagcacatacaaatattgcgttgattaagtattgggggaaagctgatgaaacttacattattcctatgaataatagtttatcagttaccttagatagattttatactgaaacaaaagtgacatttgaccctgattttactgaagattgccttattttaaatggtaatgaagtgaatgccaaagagaaagaaaagattcaaaactatatgaatatagtgagagatttggctggaaatcgtttgcatgcgcgaattgaaagtgaaaattatgtgccaacagcagcaggacttgcttcttcagcgagtgcttacgctgctttagctgccgcttgtaatgaagctttgtcattgaacttatcagatacagacttatcacgattagctcgacgtggttcaggttctgcttctagaagtatttttggtggatttgccgaatgggaaaaagggcatgatgatttaacttcatatgcacatggtattaattccaatggttgggaaaaagatttatcaatgatatttgtagtgattaacaatcagtcaaaaaaagtatctagtaggtcaggaatgtcactaacaagagatacttctagattttatcaatattggttggatcacgttgatgaagatttaaatgaagcaaaagaggcagtcaaaaatcaagattttcaacgcttaggagaagtcattgaagcaaatggtttacgtatgcatgccactaacttaggcgctcaacctcctttcacgtatttagtgcaagaaagctacgatgctatggcgattgtggaacagtgtcgaaaagccaatttaccttgttactttacaatggacgcgggtcccaatgtaaaagttttagtagaaaagaaaaataaacaagctgtgatggaacaatttttaaaagtatttgacgaatcgaagattatagcaagtgatatcattagctctggtgttgaaattattaagtaa

SEQ ID NO: 8192 - DNA, 921 bp, Staphylococcus epidermidis
atgactagacaaggatacggagaatctactggaaagattattctaatgggtgaacacgcagttacatttggtcaaccggcaatcgcaattccatttaatgctggaaaaattaaagtcctcattgaaagtttagatgaaggtaattattcttctataacaagtgacgtatatgacggaatgttatacgatgcccccgaacatctaaagtctatcattaatcgctttgttgaaaaaagtggagtgaaagaaccactatcagtaaaaattcaaactaatttgcctccatcaagaggtttaggttcaagtgctgcagtagcagtagcgtttgtacgcgccagttatgattttatggatcaacctttagatgacaaaacattgattaaagaagcaaattgggcggagcaaatcgcacatggtaagccaagcggtattgatacgcagacgattgtgtcaaataaacccgtctggtttaaacaagggcaggccgaaaaattaaaatcactaaaattaaatggttatatggttgtcattgatactggagtaaagggttctaccaaacaagcagtagaagatgttcatgtattatgtgaatctgatgaatatatgaaatatatagagcacattggtacacttgttcacagtgctagcgaatcgattgaacagcatgatttccatcatttggctgacatatttaacgcatgtcaagaagacttgagacatttaacagtaagtcacgataaaatagaaaaattacttcaaattgggaaagaacatggtgccattgctggtaaactaactggtggaggaagaggtggcagcatgcttcttcttgcggaaaatttaaaaactgcaaagactattgttgctgctgttgaaaaagctggcgcagcacatacatggattgaacatttaggaggttaa

SEQ ID NO: 8193 - DNA, 840 bp, Staphylococcus epidermidis; identical to SEQ ID NO: 6464

SEQ ID NO: 8194 - DNA, 990 bp, Staphylococcus epidermidis; identical to SEQ ID NO: 6463

SEQ ID NO: 8195 - DNA, 750 bp, Staphylococcus epidermidis; identical to SEQ ID NO: 6462

SEQ ID NO: 8196 - DNA, 765 bp, Staphylococcus epidermidis
atgaataaggatacaattgaaacatctcgtgaagcattgataaaagatgttgttatgattgctgctcgtatattacttgaatctggagctgaaggtacacgggtagaggataccatggcacgtattgctacaaaattgggctatcctgaaagtaatagtttcgtgactaatactgtaattgaatttgttttacataatgaagcatatcctcggttgtatagaattaaaactcgagatacgaacttaataaaaatttctcaagctaatgaaatctcacgtcaaattacaaatggcacaatgacgcttgaagaagctaagtatcaattagaggaaatatatgttgctaaaagagatagcagtctcccttttaaaggaattgccgcagcaattatcgctacgagcttcctctatctacagggaggtcgtctggttgatatcatcacagctgtattagctggaacgattggatacttagtagtagaaatattagatcgaaagctacacgcacaatttattccagaattcataggttctttggtaataggtattatttctgtaattggacatgcatttgttcctagcggagatttagctacaattatcattgcagcggtcatgccgattgtacctggagtactgattacaaatgctatccaagatctattcggaggacatatgttaatgtttactacaaaatctttagaagctttagtcaccgcctttggtataggcgctggtgtaagttcaatattaattttagtctag

SEQ ID NO: 8197 - DNA, 453 bp, Staphylococcus epidermidis; identical to SEQ ID NO: 6460

SEQ ID NO: 8198 - DNA, 156 bp, Staphylococcus epidermidis
atgtataaagaatataacatgactcaacatactctaccaatagaaacttcagttcttatccccacaaataatatttcacgacatgtaaatgatattgtagaaacaattcccgatactgaattcgatgaattcagacatcatcgtggcttaatataa

SEQ ID NO: 8199 - DNA, 1491 bp, Staphylococcus epidermidis; identical to SEQ ID NO: 6624

SEQ ID NO: 8200 - DNA, 372 bp, Staphylococcus epidermidis; identical to SEQ ID NO: 6623

SEQ ID NO: 8201 - DNA, 360 bp, Staphylococcus epidermidis; identical to SEQ ID NO: 6622

SEQ ID NO: 8202 - DNA, 651 bp, Staphylococcus epidermidis
atgaaatggtcagaggtatttcatgatataacaacgcgccatgattttcaggcgatgcatgactttttagaaaaagaatatacgactcaaaccgtctatccagatatacaaaatatctatcaagcatttgatttaacgccgtttgaagatatcaaggttgttattttagggcaagatccttatcacggtcctaatcaagcacatggtttagcattttcagtgcaacctcatgctaaatttccaccatctttaagaaatatgtatcaagaactagaaaatgatatagggtgtcatagaacttcgcctcatttacaagactgggcaagagaaggtgtcttgttattaaatacggtattgactgttcgacaaggtgaagcacattcacatcgaaatattggatgggaaacattcacggatgaaatcatacaagctgtttctaattatcgtgagcatgttgtttttattctgtggggaagaccggctcaacaaaaggaacgattcattgatacatctaaacacttaatcattaaatcgccacatcctagtccactatcggcttttagaggattttttggttctaaaccttattcaactacaaataactatttaaaatctaaagggaaaacaccagttcagtggtgtgaaagttag

SEQ ID NO: 8203 - DNA, 1398 bp, Staphylococcus epidermidis
atgactcaaaagtatagatatcctacttttttagaatctatttctactattttagttatggttgtcgttgtagtaattggttttgttttctttaatatcccgatacaaatattattattaatttcttcagcttatgcagcatttattgcacatagagtgggattaaaatggaaggatttagaagaggggattactcatcgattgagcacggcgatgccagctatctttattattttagctgttggaatcattgtaggaagttggatgtattctggaacagttccagcgttaatttactatggacttaaatttttaaacccaagttatttattagtatctgcatttataatcagtgcaatgacttcaatcgctacaggaactgcttggggatcggcatctacagcaggcattgcactcatatcaattgctaatcaattaggtgtgccagcaggtatggctgctggtgccattattgcaggggcggtttttggtgataaaatgtctccattatctgatactacaaatttggcagctctcgtaactaaagttaatatttttgctcacattaaatcgatgatgtggacaacaatccctgcttctataataggattggctatatggtttattgttggattacaatttaagggagacgcaaatacacaacaaattcaaaatctattaaaagaattaacaacaatttataacttgaatttttgggtatggattccacttattatcataattttatgtttaatatttagaatctctacagtaccgtcaatgcttatctctagtatcagtgctttagttattggaacattcgatcatcaatttaatatgaaagatggttttaaagcttcttttgatggatttaatcatacgatgctacaccagtctcatatttcagataatgctaagacgttgattgagcagggtggtatgatgagtatgactcaaatcattgtaactatattttgtggttatgcttttgctggtattgttgaaaaggcaggttgtttagacgtaattttagagacaatagctaaaggcgtaaagtcagttggaacactaatattaataactgtagtttgtagtattatgctagtatttgcagcaggcgttgcttcaatagttattattatggtaggtgtacttatgaaagatatgttcgaaaagatgaatgtctcaaagtcagtgttatcgcgtacacttgaagattcaagtacaatggtattgccactcattccatggggcacatctggtatatattatgcacaccaacttaatgtttcagttgatcagttctttatatgggcaatcccatgttacttatgtgcattcattgcaataatttatggctttacaggtataggaattaaaaaaataagtagaaaataa

SEQ ID NO: 8204 - DNA, 1071 bp, Staphylococcus epidermidis
atgaaaatagctattgtaggttcaggtaatggtgcagtaactgctgcagtggatatggtagataaaggtcatgatgtacgattatattgtcgtaacgaatctattagtaaatttgatgtagccctagaaaaaggtggctttgatttttataatgagggagaagagaagtttatagagtttactgatattagtgatgatatggagtatgttttagatggtgcagacattgtccaggtaatcattccttcatcattcattgaatattatgctaaagtgatgtcaaaatttgtgacgaacgaccatctcattttctttaacattgctgcttcaatgggttcaatacgatttatgaatgtattagaagatcgccatattgatgtccatccacactttgcagaagcaaatacattaacatatggtacacgtgttgactttaacaatgctaaagtagatttatctttaaatgttcgtcgtgtgttcttttcaacatttgatcgtagtgagttaaatgaaagttatgaaaaggtatctaaaatttacgattatcttgtaaaagaagaaagtttacttaaaactaaccttgaaaatggtaacccagaagtacatcctggaccaacattattgaacgttggacgtattgattattcagaagagttttctttatataaagaaggcataacaaaacatactgtgagattattacatgctattgagatagaacgtttaaatttagggagaaaattaggttttgaattatcgactgccaaagaatcacgtattcaaagaggttatttagaacggaaagacgaggatgaaccgttaaatcgtctttttaatactagtcctgtgttttctcaaattccaggaccgaatcacgttgaaaatcgttatttaactgaagatatcgcatatggattagtattatggtctagtttaggacgtgtcattgatgtcccgacacctaatatcgatgctgttattatgatagcttcaactattcttgaacgcgatttctttgaagagggcctcactatcgaggaattaggcttagataaattaggattagagtaa

SEQ ID NO: 8205 - DNA, 495 bp, Staphylococcus epidermidis
atggacaaacacacgaattacaatgaattagaatctaagaatgtgtctgatcaaacttcatcagacaatttatcgaatgacaatatagtacaccagcaatcaactattcaaaatgaggaaagtcaagataatcgtttaatggcaatgttaatttatttattaagtttatttactggtatcattggtcctttgattatttggttaatcaaacgtaaagagtcccgacttgttgatgtatctggaaaaacgtatctaaactattttatttcttatactatctattcaacagtaggcgtgatatgtatgtttatgattgttcctttaatgaatataagtgaaagtttagccatcttttcattgattttgttgctggtggtagtttttatcttattagcattgttaataatgtcatttgtgtgtacaattattgcttgtgtaaaatatatgtcaggcaaaacttacactatcccactcacgataccgtttataaaataa

SEQ ID NO: 8206 - DNA, 474 bp, Staphylococcus epidermidis
atgaaaaaaatcaaaacaatctcgacattggtagctggacttggtatagcatttctaggtcacacaacacatgcagatgcggctgaaaataacaatcaacaacaaagtacatataactatagtacaactgaagtatcattttctaattcaggaaatttatatacttctggccaatgtacttggtatgtttatgataaaactggtgggaaaatcggatcaacatgggggaatgcaaatagctgggcaactgcagctcaagcagcaggattcactgtaaataatacacctgaagaaggtgcaattatgcaatcatctgaaggtgctttcggacatgttgctttcgttgaaagtgttaataatgatggttctattactgtatcagaaatgaactatgatggtggtccattcgctataagcacacgaacaatctctgccagtgaagcaagttcatataattacatccacctgaattaa

SEQ ID NO: 8207 - DNA, 327 bp, Staphylococcus epidermidis
atgcaatggcttaaagttatattagccggttttattgaaatcatctgggtcactggacttgatcaagcgcactcattgtttacatggatattcaccctcttttttattgctttaagcttttttctagtcattgatgcttcgaagcacttaccagttggtacggtatatgcattttttgtcggaataggtgctgttggtacagtgttagttgatatgattttcttcaaccaaccatttactttcactaaaatatttttaataatgacccttattttaggaataataggattaaaactgacaactgatgcaacgaaagaagggagataa

SEQ ID NO: 8208 - DNA, 318 bp, Staphylococcus epidermidis
atggcttggttatttctaatgatagccggaagttttgaaattttgggtgttgttctgttaaatgaactgtcacgtacaaagaataaaatttatgtcatttttttaggattagcatttatattaagctttagtactttaaaatttgcaatggtatctattcctatggggactgcatacgctatatggacaggaattggtacagctggtggtacattaattggaatgattttttatggagaatctacacgtttaagtagaattttatgtattttattaatcatcatttcagttgttggattacgtttaataagttattaa

SEQ ID NO: 8209 - DNA, 954 bp, Staphylococcus epidermidis
atgacaaaagtttatattgcaggcgcaatacctgaagtgggacttaacttattgaaagaacattttgaggtagacatgtatgatggcgaggggcttatcgataaagaaaccttaaaaaaaggggtagaacatgcagatgcattagttagtttactatcaacttctgttgataaagatattattgatagtgctaataaccttaaaattatagcgaattatggtgcaggttttaataatattgatgtcgaatatgcaagacaacaaaatatagatgttacgaatacaccacacgcttcgacaaatgcaactgctgatttaacaatcggtttaattttatcagtagcgcgtagaattgtagaaggagatcatttatccagaacaacaggttttgatggttgggcacccttattcttccgaggcagagaggtatcaggaaaaactattggtattataggtttaggtgaaattggaggtgcagtggctaaacgcgcacgcgcatttgatatggatgtactgtacactggtcctcatcgtaaagaagaaaaagaacgagatatcggtgcgaaatatgtagatttagatactttacttaaaaatgcagattttattacaatcaatgcggcatataatccatcactacatcatatgattgatactgaacaatttaataaaatgaaatctactgcctatctaattaatgcaggacgtggtccaatagtaaatgaacaatctttagttgaagcacttgataataaagttattgaaggtgctgcattggatgtatatgaatttgagccagaaatcactgatgcattaaaatcatttaaaaacgttgtgcttacacctcacattggtaatgcaacatttgaagctagagatatgatggctaaaattgttgcgaatgatacaataaaaaaattaaatggtgatgaacctcagtttattgtcaattaa

SEQ ID NO: 8210 - DNA, 1125 bp, Staphylococcus epidermidis
atgaaaatagcaatagtaggcgcaggtataggtggtttaactgctgctgcgttattagaagaacaaggtcatcaagttaaagtgtttgaaaaaaatacttctataaacgaattaagcgctggtattgggataggagataatgttttaaaaaaattagggcatcatgaccttgctaaaggcattaaaaatgctggtcaaaatcttaccgcaatgaatatttatgatgagcaaggcaccccattaatgagcgctaaattgaagtctcattccctaaatgtcgcattatctagacaaactttaattgagatcatacagtcatatgtcgaagaatcatctattcacacaggatttaaagttactaaaattgaacaaacgagttgtaaggttaccctacattttaccaaacaggaaagtgaatcgtttgatttgtgtattggtgctgatgggttacattctgtagtaagagagtctgtaggtgcacgaactaaaattcgttacaatggttacacatgttttagaggcatggttgaagatgtacaatttaatgaccaacatgttgcgaatgaatattggggtgttaaaggacgagtaggtatagtcccattaattaatcaacgtgcttattggtttattactgttcatgctaaagaaggagatccaaaatatcaatcttttggaaaaccccatcttcaagcatattttaatcactttccaaatgaagtgagaaatgtgttagaaagacaaagtgaaacaggtatattacttcatgacatatatgatttaaaaccactgaagacattcgtttatggacgtactattttaatgggcgatgctgcgcatgccactacgcctaatatgggacaaggtgctagtcaagctatggaagatgcaattgtattagtgaattgtttagaaaaatatgattttaataaagcgattgagcgttatgataaacttagagttaaacataccacaaaagtgattaggcgttcgaaaaagataggtaaaatggctcaaaagcatcataaattaactgttaaacttagaaataccgcgatgaaattaataccaaatgctttggcatcagctcaaacaaaatttttatacaaatctaaagaaaagtaa

SEQ ID NO: 8211 - DNA, 138 bp, Staphylococcus epidermidis
atgcttactttaaattttcactctattgtaaaagaaatatttaaaaattcaaaaggggtatatgcttacgaatattcttttaaacctaaaaaacctgagacatcttttattgtcccaagttttttatcatatagctaa

SEQ ID NO: 8212 - DNA, 777 bp, Staphylococcus epidermidis
atgttaaagaatactcggcttcgaatgacgacattgttcataattagcatactcgtcattttagcaatactttttcttatatttgatacaaacctttttaaaaatgatgttaaacatacatttaaagaagcggtgtctcttcaaacaagtgagggaaatatccatactaaagaagttaatggtaagtttatatatgcttccaaacaagatatagagaaagctatgcaaataaaacatagtgataatgatttgaagtacatggatatatcagaaaaagtacctatgtcagagaaggaagttaaccatatcttaaaaggaaaaggtattttagaaaataagggatcaacgtttattaaagcccaagataaatatgaagtgaatatcctatatctcatcagtcatgcactagttgagacaggaaatggtcaatcagatttatcaaaaggaattaaagaaggtaactatcactattataacttttttggtattggtgcttttgatgaagatgctgtaaagactggtaagagttttgctaaacagaagaagtggaccactcctgaaaaagcgataatgggtggcgcgtggtttgtgagataccattactttaaaaataatcaattgagcttatatcaaatgcggtggaacccacaaaatccaggccaacatcaatatgctagtgatattcagtgggccaataatatagctgatttaatggagaaatactatgataaatatggaataaaaaaagatcatataagaaaaaaatattacaaataa

SEQ ID NO: 8213 - DNA, 276 bp, Staphylococcus epidermidis
atgttattaaatatcatagaaggagtgacgcatatcaatcctaaagtattaaaagctctagcaatcacatctaatgtactattagttattggaatcatctgtttaattatgctaaagctcatgttagctattgcattttttgttgtatcattaacaattagtctcgtcatttttaatgttatgttcagacaccgtacaggtatgaaaattgcaattaatgtctcgttctttatagtgatgattgctatcgtaatagcctattttgtattatcttaa

SEQ ID NO: 8214 - DNA, 951 bp, Staphylococcus epidermidis
atgcaaagatcagataaaagaaaaatgagcctgccgatgaaaatactactatgggtagtgggaattttatttctattagcaatcattgcagttatttatgttagtgcaaaaatatttattacaggagacaaaatacataatccgttaaatagaaatcattctgaattacgttctggaaaagtaaatttaaaaaatggtgatccatttactattgcactttttggcgtagattctgatgaaaagcgaaagcaacaaggcggtggggaacgaagtgatacaatcatggtactttccattaatccgaaagaaaagaaaactgagctagtaagtattccacgtgataccaaagcagaaatagcaggtcgaggtactgaagaaaagattaaccatgcatacgcttatggcggtcctaacatggctgttaaaacaattgaaaaattaatgaatgttccaattgaccattacgctacgattgacatggatggactacatgacatgattgatacattaggtggcgttgatgtcgtaagtaatagtacatttacaatgggggctaatcactttgttaaaggtgaaaaaacacacgtagatggtgatgctgccatggactttattagaagtcgtaaagaagatggggcaggaggcgattttggtagacaagagcgtcagcaacttatcttagaagcgatggcagataagttgacaagcgcttcttcaatcactcattttaatacattaatgaatcaaattcagaaaaatgttaaaacagatttaaaattaggtgatcttaatacaattagaactaagtataaagatgctaatgaccaagttaatcgacatcagttagagggtgaaggtggtatacaaaatgacggtttgtactatttcataccaagtgatgcatctaaaaatgaaaatacacaattactaagagataatttaaatttataa

SEQ ID NO: 8215 - DNA, 816 bp, Staphylococcus epidermidis; identical to SEQ ID NO: 6225

SEQ ID NO: 8216 - DNA, 690 bp, Staphylococcus epidermidis
ttgaataaattagaacgtcaaaatcgaattattcaaactattcaaagttctgacaaaattactgcatcccagcttgcaaaacaatttaacgtatctaagagaactattttacgtgatattgatgaattagaagatcaaggggtaaaagtatatgctcgtcatggcaaattaggcggttatcaaatcaaagatgcacatgctaaaatcaccttatcgttaactgaacagcaactttcggcattatttttaacactaaatgaaagtcagtccaattccactttaccttatcaaaatgaaattcgagcaataatcaagcaatgtttaaatttacctcaaacacgattacgtaaaatgctaaaaaaaatggattattatattaaatttgaagattctaatcatgtcacactacctcaattattttctgatattttaatttattgcacggagcgtaatgtgatgttagtagatttaaatgaaaataatcaaattcaagctgaaaatgtgatttttataggcttaatatgcaaaaatgctgtttggcatgctgttgtatttgaaatcggtagaggttacactcgtgaattatctatcctggatattcaagatatctcatattcttttgaaaaaacgatacaaacccaagatatctcaattgaaaattatcgacagtttttagcgccttctgaatga

SEQ ID NO: 8217 - DNA, 747 bp, Staphylococcus epidermidis; identical to SEQ ID NO: 6223

SEQ ID NO: 8218 - DNA, 336 bp, Staphylococcus epidermidis
atgaattatttagaaatttcactacatattgaacaacaacttgttaaattactctctctgagtgaaaatgcgaaatactatgcactcatacatcataacaaatttgaatcttttatagatgatttcaaccttactgtaaatcaagagatgaaatgggcaatgtctcatcaattgttgttgaattctaatgatacgcttgtatcgtactgccaattgattcgaaggttaaacgattctccacttttaactttaaaccaaggacatataatttattacattaatacacaacaaacactcattcaccgacagttactcaaacataaacaagctctttag

SEQ ID NO: 8219 - DNA, 1053 bp, Staphylococcus epidermidis
atgcttggtttctcagtctatctaggacagaatttagatcgagattatattttaaatatggctgacttaggctatgatgtagtttttacttcactacagatacctgaggaagacaagaaaaatcaaatggcttatttgggagacttatgccaactattatcagcctatcaaatcacttatattatcgatgtaaccccttcattacttaatcaaactatttacagttatttgaaccaattacctcatggggatttttatattcgtatagataatcaattaaatattgaccttatcaaagacattatcagtcacggcttcaaatgctgtcttaatgctagtacattaactgatagcatgttagcgcacatatattgtactgattttaataatcaacttttatactgtcataattattatcctagacctgatactggtttatctatctcatttattgaagaaaaaaatcaactcataagaaaatacgatgcgcatgcaaaaatttgtgcttttatacctggcacgcagaagagaggccccttattcaaaggtcttcctacagttgaaaaacatcgttttgaacaccctcttattgctgcacaagaccttcaattaacgggtatatctgacattataattagtgatacgctattatcacacatttatgcggaacaattatctaatatgtggctatatcgacactttattttacacttagatcaactagactcctcatttacatcacaagttttaaagatacacacatcaagattagattcacctgaacatgtaattcgatctcaatattctcgtacagataatcaacagactgtcccaatgataggatcggcacatagagatcaaggagatatcacaattgataatcacttgaatggtcgttatgaaggagaaattcaagttataaaagctcctatgccaggtcattcccacatcaattgtattggtcatgtttgtgataaagatgttccattgttatcactgattcaacctggagatacttttaaatttgtatatacgaaggagaataacaaatga

SEQ ID NO: 8220 - DNA, 888 bp, Staphylococcus epidermidis
atgaatcatttaactactgaaacgagaaatatacaaacgatgcatctggatgaaatgaatctaagtgatgcattaaaaactatgaatcaagaagatcaattagtacctaaagcgatagaacctgttattcctaatttaacaaaagtgatagagagtgcaattcaacgctttaataatggaggacgaattatttatattggtgcaggtacaagtggaagacttggcgtactagatgcagcagaatgtgttccaacttttaacgtttcaccaaatgatattattggaatcatcgctggtggacaaaaagctatgacggtagctattgaaggtgcagaagatgatgctgaacaaggtgcacaggatttaaagaacatccatcttcaatccaaagatattgttgtgggtatttctgctagtggacgtacaccatatgtaaaaggtgcactagtttatgcaaataaaatgaatgcagaaacagtcgcactctcttgtaacgttcacagtgatataagtaaaaattcaaatcacgtattagaaatcaatgtgggacctgaagtattaacaggctctacgagattaaaatcaggtactgctcaaaaattagttttaaatatgatttctacaatgacaatgattggcgtgggtaaagtttatgataatttaatggttgatttacgacctacaaatcaaaagttaatccatcgttctattcgcataattcaagatgtgtgtgatttaaatcatcaagaggctatagaattatatgaaaaatcagaccacaatatcaaaatagctatcgtaatgcacttatgttccacaactcaacaagatgcaagacttcgtttaaaacaaaataatggagtgattaagcaagctatcaacacttaa

SEQ ID NO: 8221 - DNA, 1425 bp, Staphylococcus epidermidis
atgagtaaagaagaacgtcttgccaaagacattacccacgcattaggcggttctcaaaacataagcaatatcatccattgtatgactcgagttcgtattaaagtacacaatgatgcaaaagttaattatgatgaattaaaatcaatcaatggcgtattaggcgttgttgaagatgaaagaattcaagttgttgttggaccggggattgttaataaagttgctaaacttatggctgaccagtcaggagcaactctatctgaagagacgactgaaaatcaaagttataaatcacaggcagaaaaacgtgcgtatgaacataaaaaacaattccaaagtcaacgaaaacaaagtaaatggaataaagtgttaaaatctattgctaatatctttatacctttaataccagcatttataggtgcaggattaatcggtgggattgcagcaatacttagtaacttgcttacagcaggttccatttcaggtcaatggattcaacaaattgttactgtcttaaatgttattaaagatggtatgttattttacttagctattttcactggtattaactcagcgaaagtattcggtgctacaccaggtttaggtggagtaatcggtggtactacattactaaccggtatcacggatgaaaatccaattaaaaatattttcactggagaacatctagctgctggacaaggtggtattattggtgttatcttcgcagtttggttattaagcatggttgagaaacgactacataaaataatacctaactctattgatatcatcgtaacgcccacaataaccttactacttattggtttgttaactatatttataatcatgccactagctggctttgtctccgatggtcttgtttatgtaattaactggattattggagtaggaggcattttcagtggattcattataggagcattctttttacctttagtcatgctaggattacatcatatcttcaccccaatccatatcgaattaatcaatcaaactggctccacttacttgttacctattgccgctatggctggtgctggacaagtcggtgcggcgattgcattgtgggtgagatgcggtaaaaataaagaattacgtaatacgctcaaaggtgcccttcctgtagggttcttaggtataggtgaacctttaatttatggtgtaacacttccattaggtcgccctttcttcactgcgtgtataggtggcggtgttggtggtgctgtcattggtggtatcggtcatattggggcgacagctgtaggaccaagtggtatttcattattaccattgattgctaataatatgtatctcggttacatcgtaggtttactagctgcttatacgggtggctttatctttacttatttcttcggcacaactaaagaaatgagaaatcctgaataa

SEQ ID NO: 8222 - DNA, 873 bp, Staphylococcus epidermidis
ttgccaaacattttgtataagattgacaaccagtatccctatttcactaaaaacgagaaaaaaattgcgcaatttattctcaactatcctcataaagttgttaatatgacttctcaagaaattgcaaatcaattagaaactagttctacttctatcatacgtctaagtaaaaaggtaacacccggtggctttaatgaacttaaaacacgtttgtctaaatttttacctaaagaagtcacacaatataatgttgagttagttgataacgaaagtacaatttcacttaaaaacaaattgcattctcgctctaaggcagcgttaagtaatgctaatgaaaccattaacgctgctatcatcgatgaaatttgtgatctaattaaaaattctgaaaccatatttatttacggctatggtgcctcatttgttgtagcaacagatttatatcaaaaattatctcgcatcggtctaaatattcaactagtgcatgaaactcatattttcaccactatgttagcaacacgtaactctaatgattgtgttatatttatatctaacaatggtactcaaagtgaaatgcaatctattgctaaagtcattgcagactatcacattcccattgcgactatttcaagcacttctgataatccagttgcaaagcaatctaatattgttttaacctatggacaaaccgatgaaaatgagatgcgtatgggagccacaacttcgttatttgcacaaatgtttactattgatatattgtactatcgatatattgcgctaaattatcaatcatctttagattttattactcaatcaaaaattgcattagataattaccgtaaacatctctcgaatatagattttaaacattaa

SEQ ID NO: 8223 - DNA, 1377 bp, Staphylococcus epidermidis
atggaaaataatgagttgcaaaggggattgaatgcacgtcagatgcagatgattgctcttggtggaacaattggtgttggtctttttatgggagcaacaagtacaattaaatggacaggtccatcagttattcttgcatatttaattgctggtatttttttatttttaatcatgagagccatgggtgaaatgatatatattaatccaaccactggttcttttgcgacgtttgctagtgactatattcatccagcagctggctacatgactgcttggagcaatgtatttcaatgggttgtcgtcggcatgagtgaagtgattgcagtaggagaatatatgaactactggttcccaagccttcctaattggataccaggagtgatagcagttctctttttgatggctgctaacctagtttcagtaaaagcgtttggagagtttgaattttggtttgccttaattaaagttgtaactattgtattaatgattattgcaggattaggattaattttatttggtataggcaatggagggaatccaatagggatttctaacttatggtcacatggtggatttatgccaaatggattcattggatttttctttgctttatctattgtgattggatcataccaaggtgttgaattgattggcatctcagcaggtgaaaccaaaaatcctcaaacaaatattgtaaaggcagtcaacggagtgatatggagaattttaattttctatattggtgcaatttttgtcattgtatcagtatatccttggaaccaattaggtagtattggtagtccttttgttgcaacgtttgctaaagtgggcattacgtttgctgctggtttaataaactttgtagtcttaacagcagcattgtctggttgtaattcaggtatttttagtgcaagtcgaatgatttatactttggcaaaaaaaggacaaatgcctaaagtatttactaaagtaatgaaaaatggcgtacctttctacactgtatttgcagtatctatgggaatattaattggtgctttattaaatgttatacttccattaattattgatggagctgatagtatctttgtatatgtatatagtgcctctattttaccgggaatgataccttggtttatgattttatttagtcatctaagatttagaaggttacatcctgaaaaggttcacaatcatccttttaaaatgccgggaggggcaattgccaattatttaactatcatgtttttactcctagtattagtcggtatgttacttaacaaagaaactgtagtatcggttgttattggtatcgtgtttttaacagctgtgacactttattatcttattagatatcacaaaaaggaacgacaaatataa

SEQ ID NO: 8224 - DNA, 357 bp, Staphylococcus epidermidis
atgaataaagcgcttgttatacgtgcaatcaaattttctttaatatttatgactgcatttttaattcttaatttattgactatgaaagaggcttcaatatcgtctattattgtacgaactgtcattgcagctattgttttctttgtcatttatatcattgtatttacaattttaagttcgtcagaacgtaaaattatttatggtacaactttacctattgcgctttttatatgccttatattcggagcaattttcttcactccgcgtataggtatcattgccggactaattataggtgtgtttgctggtgtcatatgggagttcttaaatagaaaaaatggaggtcgctcatcttga

SEQ ID NO: 8225 - DNA, 186 bp, Staphylococcus epidermidis
ttgactattattatcggactcattgtaattattttgttaatcattagtttacttccaaattataaagcaatggtattagctaagcagcaaggccaaaaacctacacgatatactattatggtaggcattgatttattattaattatacttattatagtaacattagtattaaaattgattatgtag

SEQ ID NO: 8226 - DNA, 636 bp, Staphylococcus epidermidis
atgtataaagctgtagtgtttgattttgatggtactgtcattgataccgaaaagcatttgttcgatttaataaatacacatttaaaaatccatcaagtagcgccgatttctttagaattctataaacaatttattggcggtgaagctactgaattacatacatatttagaagatgctattggtttcaaaaataaagaaaaaatttatgatcaatattatcaaacaagtgttgaattgccggtaaatcctacaatcattcaattgatgcaatatttaaaaaaacgtcatatcccaatggcgattactacaagtagttataaaaagaatatatatcctatatttaaacaattaggactagatacatatattgatgttgttgttggtcgtgaaaatgtcgatagtgttcaacctaatccggaaatttttttaaaagccgtacaagagcttaattataatcctacaaattgcttagcaattgaagattctgtcaatggtgctactgcagcgatgctagcaggattagatgttgtcgttaatacgaatataataacgaagaatcaagatttttcgacagttcaatgtgttggacaagatatggaatttgaagatataaagaattttttatttaaagaatga

SEQ ID NO: 8227 - DNA, 531 bp, Staphylococcus epidermidis; identical to SEQ ID NO: 6214

SEQ ID NO: 8228 - DNA, 1590 bp, Staphylococcus epidermidis
atgaatgcaattaaacgatttggtagtgcaatgatagtacctgttttaatgtttgcttttttcggtattgttttgggattcgctacattatttaaaaatccaaccattatgggaggattagctgatcagcaaacattttggtttaaattttggtctgttattgaatcaggtggttgggtaatatttacacatatggaaattgtctttgtagttggcttaccattatctcttgctaaaaaagcaccaggacatgcagctttagcagctctaatgggatatttaatgtttaatacttttatcaatgcaattttaactcaatggccacatacttttggcgctaatttaaaaaaaggtgtagaaaacacaacaggattaaaatcgattgcaggtattgaaacgttagataccaatattttaggtgcaatcattatctcaggaataataacgtggatacataatagatattacagtaagcgtttacctgaaatgttaggtgtatttcaaggattaacattcgttgtaacaatctctttctttgtcatgctaccagtggcagcaatcacttgtgttgtttggccaacgattcaacacggtattgcttcaattcaatattttattgttgcatcaggttatataggtgtttggttatatcatttcttagagcgtgtactaatacctacaggattgcatcattttatctatgcaccaatcgaagtaggtccagtagttgttaatcatggtttgaaagcagaatggcttcaacacttaaaccagtttgccgaaagtaataaaccacttaaagaacaattcccatatggatttatgttgcaaggaaatggaaaggtttttggttgtctaggtatagcattggcaatgtatgcaactacaccaaaagaaaatcgtaaaaaagttgctgcattattaataccagcaacacttacggcagtagtagctggtattacagaaccacttgaatttacattcttatttattgcgccatttttattcgtattacatgcactactagcagcaactatggatacactgatgtatggatttggtgttgtaggtaatatgggtggcggtgtactagattttattgcaactaactggataccattaggaaaagcacattggatgacatatgtctttcaagtagtaattggtttaatctttgttgcaatttactacttcttatttaaatatttaattttaaaatttgatattccattaccaggacgtaagaaaggtgaagaagaagttaaattattttccaaacaagattataaagataaaaaaggagattcaactcgcaatcattcacctaatagtgaatatgaagaaaaggcgatgtactacctagaaggtcttggaggaaaagaaaatattaaagacgttacaaattgtacgacacgtctacgtttaactgttaaagacgaaagtaaagttcaagaaagtgcctattttacacataatcaaatgtctcatggtttagtaaaaagtggcaaaagtgttcaagtcgtcgttggaatgtctgtacctcaggtaagagaagcatttgaaaatattgtaaatgatgatctatcttag

SEQ ID NO: 8229 - DNA, 762 bp, Staphylococcus epidermidis
atgattttagatgaacgtgtaaactctaatttcgatcaattaaatgataatgatatacaaattgcacattatgttaatacacatatagatgtttgcaaaaatatgaaaatacaagatttagcctcacagacacatgcttcaaatgctacgattcatcgcttcactcgtaaactaggttttgatggttatagtgactttaaatcctttttaaaatttgaagatagtaagaatcatcaacttccttctgattctatggagcaatttaaacaagaaattgaaaatacattcaactatttagaacgtattgattatcgtttattaactcacaaaatgcatcatgctacaacaatatacttatatggtactggacgtgcacagatgaatgtcgctgaagaagcacaacgtatactgttgactatgcataaaaatattatattgttacatgatgttcatgaactaaagatggtgttaaacaagacaattccagaagatttgtttttcatcatttcactttctggcgaaacacatcaacttaaagaagtcacacaattgcttcaactgagacaaaaatattttatttccgtaacaacaatgaaagacaatacattggcacaacaagctgattacaatgtctatgtttcaagcaataccttctatttaaacgatggtactgattattccagttttattagctatcacattttctttgaaacactactaagaaaatataacgaatataaagagaatcatgaattaacatag

SEQ ID NO: 8230 - DNA, 1974 bp, Staphylococcus epidermidis
atgagagaaaattattcgatacgtgtttttaataatttagccattaatacagaaaatgcactgagtgtaaaggtattttattgtttgaaagggaaatgtgaagtcactatcaatgttcagaaacatatattagaaaaagatgatatagcatttgttgtaatgaatgatacgtattcactgttaagtaatacagagaccatgtgttgtattatcgatatacctatacatcgatatcttagtcagaaggatactcaatttttaataagtggtacaaagattgatgaaagtagtagagatagaataaaatattggatattaaaaatattagagctccattgtttatcttataatgatgtgtccgagatacaaaggttgatacaatttttacttattgaattgagttatctaaagaaaccaaaacttgatgtaaataaagatttttatttatctgaagatatacatcaatatttagtggatcatcatgacagtaaaatcaacaaacatgaactagctgaagctgttaacctatcaaatcaagcacttacatctatgtttaaacaaacgccatttcaaacatttaatcaatatttaaatcaacttagattaaaattttgtcttatagatattttgacaacccataaacctatcgaagaaatagctatagatcatggttttcatcattattctcgatttatacaattattcaaaaatacatatggttacacacctaaattgattagaagagattatatagcgacgtctatcttcaaaaatactgctgaagaaattgatttagatagacattttcttatgaacattcacgaattacaagatttagattcaaaaataataagtaaaaaatatattaagatgtcagataaaggaaaaaaatatcgatcttatgatatttatattgaagataaccgaagtactattcttgatcaggagcagatagttcatataaagcgtaatttaagtttaagtcaaaaatcaatgcgttatgtaatagaacttaactacacttctatgattgaaaacaaagagttatgtcgttatgagatgttgaaaattttacgtttttgttccggtttgaatttaattccaacatttaaaatcattaccgatcgacatgatacttttacatcaaaggaaaaaatggctctgaagttaacatttcaaatgttattcatcatgcttagggaatttaatcaacttgagattgaatttatagtagaggacatgatgttaaaacaagtggtgcagttaaaaaagatgattagctcttattttgaatattataaattaaattatcgtattaaaaatgagaaaattggaaatgttaattatcaaaatttagaaaaacaagtgactcaaattttcattcctattgatcaattacatttatatattaaagagatatcatttgaaaaagtcattttggaaaccagctatttgaccgatttaaaaagtgagattgtagaatattcatggattcaacatattcatacattaattaaaatgagtggagaagtgaggggagttttaatacaaccgtcctttgattacgctgccacatacacatatcattcaaatttaaaaccgtatcatatcttgtcttatgtaataagaatgtttaaccaattaaggggtacaatcgtctataaagatgatgcaatcattatgactaaatataagtatgaatatcaggccattgctatctttttaaaaaataggattaaggaaaatgtaaaccatcaacaattaattttttcagatattcaatcactcaaccatgcagaatatgaatatatagaaatgatgccacttttaatgaatgagaataatgagctagatagtcatataccatacccacatcaatattggttagcaaagttgaagagtaaagaaagccaacaagcaatagttgatcttcctaaaatgagtattgctcatttaacatttctttgttcgtag

SEQ ID NO: 8231 - DNA, 729 bp, Staphylococcus epidermidis
atgcaacaacagaagattaaacgattcttagcccattttgtattagatcacgtcacaatagaatatttgaaatatggccaccagttgacaattgaacagcttaaattattaatatttatattacatttcactgaaaatcataaagaagatttaagtttaaatatgatcatcttttacaaaaattatcaaaaaaaccaattgttaaaaagtattacacatctatatgaatttaattggatttcaaaaaaacgacatccatacgaccaacgtagactagttattacattaactcaaaatcaatgtagtaaaataactcaattaattgatgaattagaacacttcttagaggtgaaatctacattaataaacgaaattaatcattcaactttattatcgtattatttaaagtgccatagtcaatttagggtaattgaacaatcttgcacatctcaacatttaacattagaagaattataccttcttgggttacttatcgttagtgataacaagactacatttaaaagcataaaagtacatgctttgaagggaatcattgcaatgggacctattattaagaccttacagtcaaaaggttatctcattaaaagtcggagtagagatgatgaacgctatattgtattaacacttagaaaagaaaaaattaatgtgattcagtcagaaatcgaggaatgttacaataaattagaacagggaatacagcatgtgtaa

SEQ ID NO: 8232 - DNA, 324 bp, Staphylococcus epidermidis
atgattttagacaatgtgaatcctgatgatttatttcctaccgagaaaaaagggccctctgtattaggtatgattgagtataacgtgcagggtcagactaaatttgaaggtgccttcatagctacaaatgaacggttaattatgaatgtagatatgaatggacaattttattatcgaaatatacgttatgatgaaattaatcaaattcattttgatggttcagatattatatttgagttcaatattggaacagttccaatgcgtgaaattaagacagaagatgtacaagcttttgttgattatataaaacaacaaattcaataa

SEQ ID NO: 8233 - DNA, 345 bp, Staphylococcus epidermidis
atgggaaaaattaaagacatcaatgatttggttaatgcgacatttcaagtaaaaaaattttttagagatactaaaaagcaatataatttaaattatgaagaaatttatattcttaatcacattttgaaaagtgaatctaacgaaatatcttcaaaagaaattgctacatgttcagagtttaaaccgtattatttaactaaagcattacaaaaattaaaagatttaaatttactatctaaaaagagaagcgtgcatgatgaaagaacagtaattgtatttgtatcagatgaacaacgagaaaaaataaaaaaattgattttagaattagaaaactatatcaaataa

SEQ ID NO: 8234 - DNA, 837 bp, Staphylococcus epidermidis
atggctgagcaacgttggaccggtcaactagatttaacagttttcaataatggtcaaagctcaaaagcacgaaatatattttttgaaaaggcgctcaaagtactacgacctatatatttagaacaatctcctgtaccaacattctatattgtcaatgttggtggaggttatctagatggagatagataccgtgtcaacgtcaacttagaagataacgcacaagtgacgcttacttctcaaggtgcaactaaaatatataaaacgcctaatgaccatgtagaacagtatcaaacgtttaatttatcaaatcaatcgtatatggaatttgtagcagatcctattattgcctatgaaaacgctaaatttttccaacataatacgtttaatcttaaagaagatagtgctatgttttacactgatatattgactccaggctattcatctaatggccaagatttcacgtataattatatgcatcttattaatgaaatttacattgacaatcaattagttgttttcgataacatgatgttaagtcctgataaaagcagacttgacggcattgggtatatggaaaattatacacacttaggatcagcttattttattcatccagatgtaaaccaaagtttcatagaagatatttacacggcggttgctgattttcaaaaacaatacgactgtagaataggtatcacacaattacctactcatggattggccgttcgtattttgactaaaagaactcaaataatagaagaaattttgactcgtgttcaatcatatatcaatcaaacgatttatcatcgacaaattaacttcttaagaaaatattaa

SEQ ID NO: 8235 - DNA, 615 bp, Staphylococcus epidermidis
atgtcaaacccaattaaaattggtatcgggggtcctgttggtgcaggtaaaacccaattgatagaaaaagtggttaaacgccttgcgaaagaaatgagtattggcgttattactaatgatatctatactaaagaagatgaaaaaatactagttaatactggtgttttaccagaagatagaattatcggtgtggaaactggaggttgtcctcatacagctattcgtgaagacgcttcaatgaacttcgcagctatagatgaattattagaacgtaatgatgatattgaacttatttttattgaatcaggtggcgataacttagcagctacttttagtccagaactcgtcgacttttcaatttatatcattgatgttgcacaaggcgaaaagattccacgtaaaggtggacaaggtatgattaaatctgatttcttcattattaataaaactgaccttgcaccatatgtaggtgcttcattagatcaaatggctaaagacactgaagtatttcgtggaaatcgcccattcgcttttacaaatttaaaaactgatgaaggtttagaaaaagttattgagtggattgagcacgacgtcttactgaaagggttaacttaa

SEQ ID NO: 8236 - DNA, 690 bp, Staphylococcus epidermidis
atgattgatcaccaacatttaagactttttcagttctgtgattctcagtttcctacaggtgcatttagtcattcttttggacttgaaacatatattcaacgagaaactgtacatgatactgagacatttattaaatggttacatttgtttataaacgaacaattaacttattcagatgggttagctatgagaattgtctaccacgcattaattaacaatgacaaagataaaattttagatattaaccaaaaactcttcgtacaaaacctacctaaagaaacgcgtattggcgctaagcaaatgggtacacgcatggtaaaattagctttagatctttatgatagtgaatggattcaatggtattataatcaaatgaaaaaccataaaattaagcttcatcctgctgtgtgctttactatgctaggacattttttaggtgtagatgtggaatccatcattgattattatttatatcaaaatatctctagccttacccaaaatgcagtaagagcgattcctttaggacaaacagctggacagcaagtcgtaactgaaatgatagcccatattgagaagacacgaaatcacatactagaattggacgaaatcgattttggtatgactgctcccggcttggaacttaatcaaatggaacatgaaaatgttcatgttcgaatctttatttcatag

SEQ ID NO: 8237 - DNA, 453 bp, Staphylococcus epidermidis
atgattatagaagaaattcaaggaaatattgctaatttatctcaagatgaaaagcaaaaacatgtcgaaaaagtttatcttgaaaactcagatttggttaaacgtatacaacgtgttaaaacagatcacggtaatgaaatagggatacgtcttaaacaacctattgacctacaatatggtgatattttatatcaagacgatacaaacatgattattgtcgatgttaatagcgaagacttattagttattaaacctagaaatttaaaggaaatgggagacattgctcatcaactaggtaatcgccatctacctgcacaatttacagaaactgaaatgcttattcaatatgactatcttgttgaagatttattaaaagagttgggtatcccctactcacatgaagacagaaaggtcaatcaagcatttcgacatataggacattcgcatgattga

SEQ ID NO: 8238 - DNA, 1716 bp, Staphylococcus epidermidis
atgagttttaaaatgacacaatctcaatacacaagtctttatggaccaactgtaggagactctgtgagattaggagatacgaacttgtttgcacaagttgagaaagactatgcaaattatggagatgaagctactttcggtggcggaaaatcaattcgtgatggtatggctcaaaatcctaatgtgacaagagatgataaaaatgtagccgatttagttttaactaacgcattaattattgattatgacaagattgttaaagcagacatcggaattaaaaatggttatatttttaagatcggtaaagctggaaacccagatataatggataacgttgacatcatcattggtgcaacaactgatattattgctgctgaaggtaaaattgttactgccggcggtatcgatacacacgtgcactttatcaatcctgaacaagctgaagttgcacttgagagtggtattacaacgcatatcggtggaggaactggtgcttctgaaggtgctaaagcgactactgtaacaccaggaccttggcatattcatcgcatgttagaagcagcagaagagatgcctattaatgtaggatttactggtaaagggcaagctgtcaatcatactgcacttattgaacaaattcatgcaggcgctataggtcttaaagtacatgaagattggggagctacaccttcagcattaagtcatgcattagacgttgcagatgagtttgatattcaagtcgctttacatgcagacacattaaatgaagctggatttatggaagatacaatggctgctgttaaagatcgtgtattgcatatgtatcatactgaaggagctggtggtggtcatgcacctgacttaatcaaatcagctgcatattcaaacatcttaccttcttctacaaacccaacattaccttacacgcacaacactgtagatgaacatttagacatggttatgatcactcaccatcttaatgcttcaataccagaagacattgcatttgcagattctcgtatacgtaaggaaactatagcagcagaagatgtattacaagatatgggcgtatttagtatggtaagttcagattcacaagcaatgggacgtgtcggtgaagttgtaacacgtacttggcaagttgcacaccgtatgaaagaacaacgcggaccactagatggtgactttgaatatcacgataataatcgtattaaacgttacattgcaaaatatacaatcaatcctgccattacacatggtatttctgactatgttggatctgtggaagcgggtaaacttgccgatttagtaatgtgggaaccagaattcttcggtgccaaacccgatcttgttgttaaaggtggcatgattaactctgcagtaaatggtgatgctaatggctccataccaacatcagagcctttgaaatatcgcaaaatgtatggtcaatttggtggtaacattacacatactgctatgacttttgtttctaacactgcatatgaaaacggtatttatcgtcaactcaatctaaaacgaatggttcgaccagttagaaatattagaaatttaactaaggcagatatgaaaaataataatgctacacctaaaatagatgtagatccacaaacatatgaggtattcgttgatggtaataaaatcacaagtgaagcagcaacagaattacctttaacacaaagatacttcttattctag

SEQ ID NO: 8239 - DNA, 402 bp, Staphylococcus epidermidis
atgattcctggtgaaattattgttaaaaatactgaaatagaagtcaataaacatcatcccgaaacggtgattgaagtgaaaaatacgggcgatagacctatacaagtaggttcacatttccactttttcgaagcaaataaggcattagaatttgatcgtgagaaagcatatggtaaacatttggatattcctgcaggagctgcagtgagatttgaacctggagatgaaaaaaaagtacaacttgtcgaatattctggacgacgtaaaatttatggattccgtggtttagtcgatggcgatattgacgaagaacgcgtattccgtccaaatgattcaaatcaaaacgccgccgttaaaaacgatgcaggcgaagacaatgcgaataaaaaaggtggtaaataa

SEQ ID NO: 8240 - DNA, 303 bp, Staphylococcus epidermidis
ttgcactttacacaacgtgaacaagacaaattgatgatagttgtagctgctgaggttgcacgtcgtagaaaagcaagaggacttaaacttaatcatcctgaagcacttgctttaatcagtgatgaattattagaaggcgcgcgtgatggtaaaacggtagctgaacttatgagctatggaaaaacaattttaaacgaggaagatgtcatggatggcgtagctaacatgattacagaacttgaaattgaagcaacttttccagatggtactaagttaataacagtccatcacccaatcgtttaa

SEQ ID NO: 8241 - DNA, 903 bp, Staphylococcus epidermidis
ttgaaattgataaaagtaattttaagtagtatctctcaagtggttttaattaataatccatatactgggttattcattttaattggactgtttgcagtgaattggaaagtaggaatcagtgccatgattgcaagtgtaatgacttggatattggcaccatatatgaattacacaaaagaagaaatcgaaagtggattagccgggtttaaccctgtattaaccgcaattgcacttactttatttttggatagcaattggagcggtatattaatcacattcgtagccactattttaacgctaccgattggagcagcgattagagaagtattgaaaccacataaaatagcatttctaactagtccgtatgttattatgacgtggattacattattaatacctaatcaacttaaaacgttacatactcagattgatattattccggagcatatagaaaaggtatctttaaataatgaccacaccagtgttcatttttttcaatcagttttagatggatttggacaaatatttttaatgcccagcataataggtggtttgttaattctaatagggatttttataggttctaaaaaagctggaattgtttctataattgcaaacattattgggttcctaataattatattactgggtggagactatagtagtataaatgaaggcatatttggctataatgtagttttatctgcgattgcgctaggtgtcacttttgagacagcaattcatagttatctcgcaatgattttaggaatagtactcactgcattcatacatttaggtttgagcacattgctcgcaccactaggtttaccaactttaacatggccatttatttttgctacatggattatgttgtttgcaggaattaaaaatcaaactgtataa

SEQ ID NO: 8242 - DNA, 1143 bp, Staphylococcus epidermidis
atggagtcttttttaattcacactgacattcaaaagaagtggattcgtaaatttaaaaagattgaaagtgaattcaaagcacgtgcagctgaaaatgatattcaatctagatttccatatgaaaatattgagtggctgataaaggaaggatatactaaactaactttgcctgtagagtatgggggtgaaggtgctactattgaagatatggtaattttacaaagttatttgggtactattgatggagcaactgctttatctatagggtggcatttgagtgtaattggtcaattgtacgagcaacatatgtggacaccatcaatgttagattcctttgctaaagaagttgttcacggtgcactgatcaatagagcagtcagtgaagcggaaactggtagtcctactagaggtggtcgcccatctacacatgctgttaaagctgaaaatggttatgttataaacggtgttaaaacctttacatctatgagtaaggcgttgacacattatattgttggcgcgtatgttgaagaaactaaatcgatgggattctttttaattcctcagtcaactaaaggtgtaagtattgctgacaactgggatatggttggtatgagagcgactgagagccatgatttaattcttgatgatgtttatgttcctaatgaaaattttgtagaatcaaaacgtgaatcaagacctaatggttggcttcttcatataccgagctgttatctaggtattgcacaagcagctcgtgactatgcagtagattttgcaaaaaattatcgtcctaacagtattacaggtacgattgatagtttacctacagtgcaacaaaatttagggaaaatggaaagtttattactttctgcaagacattttctatggagtacagctagagggtatcaatcatatacagaggatgcacaaatatggaatgaaacctcagcaagtaaagtggtggtaatgaaccaaagtatagaaatcgttgatttagctatgagaatagttggagctaagagtctagaaatgagcagacctcttcaacggtactatagagatatacgtgctggattacataatccaccaatggaagatatggcttacactaatattgctaaaagtattacaaacaaactttaa

SEQ ID NO: 8243 - DNA, 942 bp, Staphylococcus epidermidis
atgaccaaagtatattttaatcatgatggtggcgttgatgatctagtgtcactatttttattattacaaatggaaaatatagaacttgttggtgtaagtacgattggtgcagactgctatttagagccgtcattaagtgcttcattaaagattataaatcgtttttcagacgttgaaattaatgtagcaccatcatatgaaagagggaaaaatccttttccaaaagaatggagaatgcatgctttctttatggatgccttaccagtgctaaatgagtcttgtatacccaaaagatgtaaggctagtgaggacgaggcgtatatagatattattcgtaaggtgaagagttgtgatgagaaagttacattgttatttactggaccgcttacagatttagctaaagctataaaatatgacaactcaattttaaaaaatatagagaaattagtttggatgggtggaacgtttttagacaaaggaaatgttgaagaaccagaacatgatggtacagctgaatggaatgcattttgggatccagaggctgtaaaagttgtattagatagtgatatgattgtcgatattgttgctttagaaagtacaaatcaagtccctctaacaatggaagttcgtcaaatgtgggcagataaaagacaatatttaggcgttgattttctgggcacaagttacgcagcagtaccaccactcacacattttgtgaccaattcaacatactttttatgggatgtattaactactgcttatgtgggttctccaaatttagttgaatcaacgaaattgaaaattgatgtagtcagtcaaggacctagtcaaggaagaacattccaatctgaaaatggacgtgaagttcaagtcattacggatgtaaataaacaagcattttttaaatacataacggatttagcaaagaaaatcgagacctaa

SEQ ID NO: 8244 - DNA, 549 bp, Staphylococcus epidermidis
gtgactacaaaacatttagtatatacagctttaatgactgctatcatttgtattttaggtttagtaccaagtgtacctctgccatttatgccagtccctattgtattacagaatataggaatctttttggcaggaattattttaggacgaaagcttggtactacaagtgttattgtctttttattattagtagctacaggtttgccagtgctttctggaggccgtgggggaattggcgtatttgcaggaccttcggcaggattcttattcttatatcctgttgtagcttactttataggtattattcgtgatgcatatttgcataaaattaatttcttagtgatttttatagctacactagttatcggtgtattaggattagatatattaggtacactcattatgggcttcattatacatatacctatctctaaggcatttatattatcatttacatttatgccaggtgatattattaaggctattattgcaagtttaataggtgcagcaattttaaatcattcacgtttcaagactcttattcaataa

SEQ ID NO: 8245 - DNA, 756 bp, Staphylococcus epidermidis
atgtcgaaaataacttttaaagatatttatattgatggaaataaaataactgaagatactagaaaggtgatttatctcttaccttctcaacctttaaaatatgctagtaacacgtggatttataaaacgatgccaacaatgaaccagtggcttaaagacattgaagttcaaaagaaaatgcatctaaatcaatcatcctatcatctttcattttcatttccagctaatgaaaagatagatgaagtattgttggaaaaaatacgtgaactaggttttcagataggagtacttgagctctatgtcattgaagctaaagcgttaaaggagctctcccgcaaaagagacgtagatattcaacttgtatcaagcaataatatcaatgattaccttcatgtttatgatgcgtttgcacggccttttggtgatagctatgccaacatggttaaacaacatatttatagctcatataacttggacgatattgaacgtttagttgcatatgttaaccagcaaccagttggaatagtcgatactataatgacggataaaacaatagaaatagatggttttggggttttagaagaattccaacatcaaggtatcggttctgaaatacaagcttacgttggacatatggctaatgagcgacctgttattcttgttgcagatggagaagatactgctaaagatatgtatctaagacaaggatatgtatatcaaggttttaagtatcatattttaaaagaaaatatttaa

SEQ ID NO: 8246 - DNA, 786 bp, Staphylococcus epidermidis
atgaaaattaaacatatttttattattattttaacattgtgtgtagtattagcaggttgtaccaacgagaaaggtcagaataaagaacagaatgaaaaacaatcgacaaaaggtgataaacaagaacttcaagtttctgctgcagcaagtttgactgaagtcagtaaagcattaggaaatgaatttaaaaaggaccatccaaatgtagaaattaaatttaactatggcggatcaggtgcgttaagacaacaaatagaagcgggtgctccgtcagatgtcatgatgtcagctaacactaaagatatagacctgttgaagaaaaaaaacaaagcacatgacacttataattatgcaaagaatcaacttgtattaattggtgataaaaataaaagttatacctctgtaaaagatttaaatcaaaacgacaaactcgcactaggacaaataaaaacagtgcctgctggtaaatatgcaaaacaatatttagatgatcaacatttatatggtgatgttaaagataaaattatttttgctaaagacgtaaaacaagtattaaattatgtggaaaaaggaaacgcacaggaaggattcgtttacaaaacagacttatatcaacaaaagaaaaaagcaaataaagttaaagtcatcgaagaaattaaattaagcaaaccaattacttataaagcaggtgcaacttcagataaaaaattagctaaagaatggattaacttcttaaaatccaataaagctaaacaaattcttaaagaatatcaattttctgtataa

SEQ ID NO: 8247 - DNA, 672 bp, Staphylococcus epidermidis
atgcctgatttaacgtccttttggatttcttttcgtgttgctttaatcagtacaatgatagttactatttttggcattttgatttctaaatggctatacaataaaaatagatattgggtaaatctattagaaagttttatcattttaccaattgtgttaccacctactgtccttggttttatactattaattatattttcaacaagaagtcctgtaggagaattctttactaatatcttacacttaccagttgtatttactttgacaggtgcagtgattgcatctgtcattgttagttttcctcttatgtatcaacatacagtgaatggttttcgaagtatagattcaaagatgttaaatactgcaaggacgatgggagcaagtgaaacaaaaatattttttaaattggtgttaccattatctaaacgttctattcttgcaggtattatgatgagctttgcaagagcaataggtgaatttggtgctactttgatggttgctggctatatcccagacaaaacaaatacattgcctttagaaatttattttttagtggagcaagggaaagaaaatgaagcatggttatgggtgcttgtattagttgcgtttgcggtaactgtcatagcgaccataaatctggttaatcgtgatacgtttagggaggttgattaa

SEQ ID NO: 8248 - DNA, 621 bp, Staphylococcus epidermidis
atgctcacaattaaagtgaatggtgttctttatcagacgaaaattaatataaatatagaggatcaacaccctaagatatatgcgatacagggaccatctggaattggaaagacaacaattttaaatataattgccggtttgaaatctataaattattcatatataaaggttggtaaacgtgtattaacagattcacaacaccatttgaatgttaaggttcaacaacgtcgtataggatatttatttcaagattatcaacttttccccaatatgaatgtttataacaacataacgtttatgactaaaccttctgaacatatcaatgaacttattcatactctaaaaatagagcatttacttgaaaagtatcctgtgaccttatcaggaggtgaagctcagcgcgtcgctttagcaagggcgctaagtacgaaacccgatttgattttgcttgatgagcctttttcaagtttagatgataagacaaaaaaagaaggtatcaaattaattttaaaaatattcgaagcatggcaaattcctattatatttgtaacgcattcaaattatgaagcgcaacaaatggctcatgagattataacaattgaagattgtatacaaatatag

SEQ ID NO: 8249 - DNA, 1002 bp, Staphylococcus epidermidis
atgcaagaaagatactcgagacaagtgttgtttaaggaaattggtttaaaaggtcaaagtctacttgagaaaaaacatgtgcttatagtaggtatgggtgcgttaggaacacacttagctgagggattagtgagagcgggaataaataagttaaccattgttgatagagattacattgaatttagcaatttacaacgacaaacgctctttatagagcgtgatgcagaagatgtactaccaaaagtaatcgctgcacagaaagttttaaaagagatacgtaaagatgtagagatagatgcttatattgagcatgttaattacaatttcttagagcaacatggcatgcatgtcgatatcatattagatgcaactgataattttgatacacgtcagttaattaatgactttgcttataaacatcagattccttggatttatggtggtgttgtacaaagtacatatgttcaggcaacgtttattcctggtgaaacaccgtgttttaattgcttaatgcctcaattaccatctattaatttaacatgtgatacggttggagttattcaaccagctgtaacaatgacaaccagtttacaactcgttgatgcattgaagttgctgactggtaataaggttaataaacacttcacttacggggatatttggacaggagatcattatacatttggttttagtcgtatgcaaaatgaagattgtaaaacttgtggtaatgctccaacatatccacaccttaatcaacatcaacaagattatgcgaccttatgtggaagagacactgttcaatataaaaatgctgatatttctcaggaaatattactatcatttctcgagcgaaatcatattcaatatcgcacgaatttatatatgacaatgtttaggtttagagaacatcgaattgttgcattttctggaggtagatttttgatacatggaacgacggaacctaaaaaagcaattcaattaatgcatcaactatttggttaa

SEQ ID NO: 8250 - DNA, 531 bp, Staphylococcus epidermidis
atgcacaaacatcaacatcagaatattcatttaaacagaccgattcatgtagcaattttgactgtatcggatacgagagattatgattctgataaaggtggtcaactgattcaatctttgataaatcaacatgagaatcatgttgatattaaccactatcgaattgttaaagatgatatagaagctattacacaccaacttaagctttggttaacttcgtcaaatcaactagatgtcattattacaacgggaggaacaggtatctcacaaagagatgtgacaatagaagctgttcgcccattgttaactaaagaattagaaggttttggtgaattatttagatacttaagttataccgaagatgttggtacaagagcattattaactcgagctattgcaggtacctgtgatagcaccttaatttttgcacttcctggctcaactggtgcaattaaacttgcaatagaaaaattaattaaacctgaattgagtcacttagtgtttgaattaaataaagacattaggtattaa

SEQ ID NO: 8251 - DNA, 489 bp, Staphylococcus epidermidis
atgactcatttcacacatattaataaacaaggtaatgctaaaatggttgatgtttctaataaggaaattacaaaacgtgtagcagaagcacactcaagtataattgttaatgaaaaaatttatagacaaattactcaaaatactaatagtaaaggaaatgtacttaatactgcgcaaattgctggtattatggcagctaaaaacacttctacaatcattcctatgtgtcatccattaccacttacaggcatagatatatccttcaaatgggattcaaataatgatgattcatatcgtttaaatattacagcggtcgtgtctacaacaggtaaaactggtgttgaaatggaagcattgactgctgcttcagttacagcacttacaatctatgatatgacaaaagctatagacaaaggcatgataattggagaaacgtacttagaatctaaatctggtggtaaatctggcgacttccacagaaaaaattga

SEQ ID NO: 8252 - DNA, 1260 bp, Staphylococcus epidermidis
atgtctatagagaaaagaacgccaatatcagttaaagaagcaattaaacgtattatgaaacaacaggttgaagtgaagaatatcaatgttaatttagatgaaagtttaggacatattcttgctgaagatattgttgcgacctatgatataccaagatttaataaatcaccctacgatgggtttgcaattagaagtgaagattcacaaggtgcaagtggcgaaaaccgtattgaatttgaagtaatagatcatatcggtgcaggttcagtttcagaaaaaacaattgataaaaaccaagcaattcgaataatgactggtgctcaaattccttctggagctgatgccgtagtaatgtttgaacaaactattgaatctgaaacaacttttacaattagaaaatcctttaaacatttagaaaatatttcgctacaaggtgaagaaataaaagctggtgatattgtactgcataaaggtatgcgtattaactctggtgtgatagcagtcttagctacatacggttatactaaagtgcgagtggctcgaaaaccaactgttgcagtaattgctacaggtagtgaattgcttgaagtagaagatgagcttgaaccaggaaagatacgaaattcaaacggaccgatgattaaagcattagctaaacaatttggaatacaagttggaatgtataaagttcagcatgataatctcgaaaagagtatggaggttgtaaaaaaagctttatcagagcatgatttagtaattactactggaggtgtgtcggtaggagattttgattacttaccagaaatatacaagtctatccaagcgcagatactatttaacaaagtggctcaaagaccaggtagtgttactacggttgcatttgcagatggtaaatatttatttggcttatctggaaacccttcagcctgctatacaggatttgaattatatgtcaaacccgctgtaaataagctcatgggaactaaagcttgttatccgcaaataatcaaagctacacttatggaagactttaataaagctaacccatttacacgattgattcgtgctaaggcaacattaacaaaagctggaatgacagtaataccatctggatttaataaatcaggtgcagttgtagccattgcgcacgctaatgctatgattatgcttcctggtggcacacgtggatttaaagcgggcaacattgttgatgtgattttgaccgaatctaatagttttgaagaagaattgatactatga

SEQ ID NO: 8253 - DNA, 477 bp, Staphylococcus epidermidis
atgattttacaaattgtaggtatgaaaaattcagggaaaactacattgatgaaccatgcgatatcatttttaaaagaacgaggctattcagtagcaacaattaaacatcacgggcatattggtgaagaaattgaattacagtcatctgatgttgaccacatgaaacatttcgctgcgggtgcagaccaaagtattgttcaggggcatcatttacagcaaacagtgacacgtaaaaagaaacaatcgcttagagaaataatagaaaattctgttacaattgattatagtatcattttagttgaaggctttaaagaagcaaattatgataaaattatcgtttataaaaataatgatgaattaagaagtctacaaggactttctcacgtcatagggaaaatagaaaccaatcatccacgtgcaaataatcaacttgagcacttactcaacaaattaattaaggataagggaatgaattaa

SEQ ID NO: 8254 - DNA, 453 bp, Staphylococcus epidermidis
atgaagcaatttgaaatcgtgactcaacctattgaaacagaacaatatagggattttacgattaacgaacgtcaaggtgccgtagtcgtatttactggtcacgtaagagagtggactaaaggtattcgtacacaacacttagagtatgaggcttatataccaatggctgaaaaaaaattagctcaaattggtaaagaaattgaagaaaagtggcctggaacaataacaacaattgtacatcgaattggtccgttacaaatatcagatattgcagttttaattgcagtatcttcaccgcatagaaaagcagcatatgcagcgaatgaatacgccatcgagcgcataaaggaaattgttccaatttggaaaaaggaaatttgggatgatggatctgaatggcaaggccatcaaaagggaacatataatgaagcaaaaaaggggaaagcaagatga

SEQ ID NO: 8255 - DNA, 234 bp, Staphylococcus epidermidis
atgaaaattttatattttgcagagttaaaagagttgctcaatcaatctactgaaacgatacatttagatacgacattaactgttcaggaattcgagtcatatttattaaaacaccatagtgaacttaaatctaaaaaatttcaaattgctgttaatgaagaattcgtcagacaggatgatatagtccaaccaggagatacaattgcgctcattccaccggtcagtgggggttga

SEQ ID NO: 8256 - DNA, 606 bp, Staphylococcus epidermidis
atgaaagcaattattttagcaggtggagaatctagccgatttggtaaagctaaagcttttgctaaaattgataatcaatatttttatcaaaaaattatagaaacgttaaaatctacaaatatgtttaatcgcattatcattagcactaattcccaattagcttctcagtttgaatatgaatatgtgattattgatgacgaacatcatcaaaataaagggccgctaacaggaatttactcagtgatgaagcaatacatggatgaagaattgtttttcattgtatctgttgatacaccaatgattacaagtaaagcagtgaatgggttatatcatttcatggtatcaaacttaattgaatcacgtttagatattgtcgcgtttaaagaaggagaaatatgtataccgacgattggtttttatactctatcgacgtttccttttattgaaaaagctttaaattcaaatcatttaagtctaaagcatgtcattaaacaattatcgacagattggttagatgttactgaaattgactcgcctcattattggtataagaatattaattttcagcatgatctggactctttaaaaaagcagataaatgaataa

SEQ ID NO: 8257 - DNA, 1023 bp, Staphylococcus epidermidis
atgaaagcgctaatacaagataaattaggccgtccaatacgggatttaagaatatcggtcactgatcgatgtaatttcagatgtgattattgtatgccaaaggaaatctttggagatgattacactttcttacctaagaatgaattgcttacttttgaagaattgacacgaatttcaaaaatttatgctcaattgggagttaagaagataagaattactggaggagagcctctcttacgacgcaatctttataaacttgtagagcaattaaatctcatagatggtatagaggatattggattgactactaatggcttattattaaaaaaacatgggaaaaatttatatcaagctggtttacgacgtattaatgtaagtttagatgcgattgaggataacgtttttcaagaaattaacaatagaaatattaaagcgtctacaattttagaacaaattgattatgcaatatcaataggttttgaagttaaagtaaacgtggttattcaaaaaggggttaatgataatcaaattattccgatgattgattattttaaaaataaaaatattgaagtacgttttattgaatttatggatgtaggtaatgataatggatggaatttcaataaagttgtaactaaagaagaaatgcttaatatgatagaacaacattttgagataagtcctgtaacacctaaatattatggggaagttgctaaatattttcgacataaagataatgatgcacaatttggtctaattacgagtgtatctgaatcattttgctccacatgtacgcgtgctcgattatcttcagatggtaaattttatggttgtttatttgcctcctcagagggatttgacgtaaaagccttaatacgcagtggagctacagatgatgatttaaaagcacaatttaaacgattgtggagtattagaaacgatcagtactctgataatcgtacgatgcaaactattgagaataatagaaagaaaaaaattaatatgaattatataggtggataa

SEQ ID NO: 8258 - DNA, 351 bp, Staphylococcus epidermidis
atgagtaacaaagtacaacgttttattgaatcagagagagaattaagtcaattaaagcattggcttaaaacgacatatcgtatttctattgaagaatttgtagttctttacaaggtctatgcagacactaaaattagtggtaaagagttacgagacacattacatttcgagatgttatgggatacaagtaaaattgatgtgattattcgtaaaatctataagaaagaactcatttctaaattacgctcagaaaccgatgaaagacaagtttactatttcttcgatgcaaagcaaaagaaattattggacaaaatgactggagaaattgaaacaattagtattgcaaattaa

SEQ ID NO: 8259 - DNA, 645 bp, Staphylococcus epidermidis; identical to SEQ ID NO: 3892

SEQ ID NO: 8260 - DNA, 747 bp, Staphylococcus epidermidis; identical to SEQ ID NO: 3893

SEQ ID NO: 8261 - DNA, 837 bp, Staphylococcus epidermidis; identical to SEQ ID NO: 3894

SEQ ID NO: 8262 - DNA, 930 bp, Staphylococcus epidermidis; identical to SEQ ID NO: 3895

SEQ ID NO: 8263 - DNA, 2040 bp, Staphylococcus epidermidis; identical to SEQ ID NO: 3896

SEQ ID NO: 8264 - DNA, 465 bp, Staphylococcus epidermidis; identical to SEQ ID NO: 3897

SEQ ID NO: 8265 - DNA, 303 bp, Staphylococcus epidermidis; identical to SEQ ID NO: 3898

SEQ ID NO: 8266 - DNA, 483 bp, Staphylococcus epidermidis; identical to SEQ ID NO: 3899

SEQ ID NO: 8267 - DNA, 1500 bp, Staphylococcus epidermidis; identical to SEQ ID NO: 3900

SEQ ID NO: 8268 - DNA, 345 bp, Staphylococcus epidermidis; identical to SEQ ID NO: 3901

SEQ ID NO: 8269 - DNA, 426 bp, Staphylococcus epidermidis; identical to SEQ ID NO: 3902

SEQ ID NO: 8270 - DNA, 2403 bp, Staphylococcus epidermidis
atgagtttagtatatcttatggcgactaatttattagtcatgctcatagttttattcactctgagtcatcgtcaactaagaaaggttgcgggctatattacattaatagctcctattgtgacatctgcatattttattatgaaaataccagatgtgattcgaaataagtttattgctgttcaattaccatggatgccttcaattgatattaatttagatttaagattagatggtttaagtttaatgttcggcttaattatttcactaataggtgtgggtgtgtttttttatgccacgcaatatttatctcacagtacggacaatcttcctagatttttcatctatttactattatttatgttcagtatgattggcattgtaatagctaataataccatcttaatgtatgtattttgggaactcacaagtatttcctcattcttgcttatatcctattggtacaataatggtgaaagtcaattaggcgccattcaatctttcatgattacagtgtttggtgggctagcgttattaacaggatttatcattttatatatcattacaggaacaaacacaattactgatatccttaatcaacgcaatgcaatttcacgacatcctttatttataccaatgattttgatgctattattaggtgcttttaccaaatctgcacaatttccgtttcatatttggttaccaaaggccatggcagcacctacaccagtaagtgcttatcttcattcggcaacaatggtaaaggctggaatctttttactatttagatttacacctttattgggacttagtaatgtttatatttatacagtgacatttgttggtctaataactatgttatttggatctttaactgctttacgacaatacgacttaaaaggtatactcgcttattctacaataagtcaattaggtatgattatgacaatggtaggtctaggtggcggttatgctcagcacacatcagatgaattgtctaagttttatattttagttttatttgctggcttattccatttaatgaatcatgcggtttttaaatgtgcattatttatgggcgttggtatcattgatcacgagtccggaacacgtgatattcgtttgctaaatggtatgcgtaaagtcttccctaaaatgcatattgtcatgttgctcgctgcattatctatggcaggtgttccttttttaaatggctttttaagtaaggaaatgtttttagattcgttaactaaagcaaacgaacttgatcaatatggcttcgtattaacgtttgtgattatttcaataggtgtcatcgcgagtatattgacttttacttatgcactttacatgataaaagaaacattctggggaaattacaatatagaaaaatttaaacgtaaacaaatacatgaaccatggctatttagtttaccagctgtgattttaatgttactcattccagttatcttctttgttccaaacgtttttggcaactttgttattttgcccgcaaccagatctgtatctgggataggtgcggaggttgatgcatttgtgccacatatttctcagtggcatggtgtgaatcttccattaattttaagtatagttgttattattattggacttattttagctctagttgtgaattggaaagaggttacgcatcaaataatcaaaagtgcttcgattacagatggctatcggaaaatttatagagaatttgaattatactcagcccgtggtatacgtgcattgatgaataataaattgaattattacatcatgattacattatttatttttgtagctattgtagtttatggatatttgactgtgggttttcctcatgtacatcagcttcatattagttctttcggaccgttggaagttatcttatcagttgtaacattgattatcggcatttcattaatctttattcgtcaacgactaacgatggtggtattgaatggaatgattggattcgcagttacattatattttattgcaatgaaagctccagatttagctttaacacagttagttgttgaaactattacgacaatcttatttattgttagtttttcgagactacctaacatccctcgagttaaggcaaatttaaaaaaagagaccttcaaaatcattgtgtcacttgttatggcattgacggtggtatcacttatttttgttgctcaacaagcagatggtatgccttcaattgctaaattttatgaagatgcatatgaacttacaggtggaaaaaatattgtcaatgctatactaggtgacttcagagctttagatactatgtttgaaggactagtgttaatcatagctggattaggtatttatacgttacttaattacaaagataggagggggcaagatgaaagagaatga

SEQ ID NO: 8271 - DNA, 207 bp, Staphylococcus epidermidis; identical to SEQ ID NO: 3904

SEQ ID NO: 8272 - DNA, 225 bp, Staphylococcus epidermidis; identical to SEQ ID NO: 3905

SEQ ID NO: 8273 - DNA, 141 bp, Staphylococcus epidermidis; identical to SEQ ID NO: 3906

SEQ ID NO: 8274 - DNA, 894 bp, Staphylococcus epidermidis; identical to SEQ ID NO: 3907

SEQ ID NO: 8275 - DNA, 954 bp, Staphylococcus epidermidis
atgaccaagcaacgcatcgttatttcttcattactattcattttcattctcacaacttgtagttttagttacattactttctctaaattaacttctaaaacagaagatattaaaaatataaaaactataaaagcaaagcccaaattactcctttcaacaactggtatacaagcccctcttaacagctatattttctactacactcccactttaggacaactccaaaaacttttagtaaaaaatcatagcaaagtatctaaaaacactccagtgttagaatattacaattatgaaaaagatcatttatatgaggaactccaaaatacacttagtaatgaacgtaacaacaaaactttaaattctaaaaatgatttacattattattcattccttaatcagctaaaattacaaatgattcaaactaaatcctcaattaaatccactttattttcaccaattaatggaagtatttcatatattaattctatcccttcaaaaccaaacgaaaagatagtgcaaattaatagcaacgaacgtattattcgtgctaatatatcagaatctgagttgaatttattaaaaataaatcaaaatatttctgtaacatctagtgacaacactcaatttactagtaaaattaaagaaatttcgaatataccatcaaaaataaaaaatggcgtctcatattacgacattttactttctacacaacccaatcatcaaattggaacacactttaaaatcaaattagcctcaaatgacatagagttacctacgtcagctattgttcaaaaacgctatgttttaattctaaaaaacgggaaaattacaaaaagagaagtaacatacaaaaagagtttaaaaagtgggtatattaatataactaaaggcttattgatagatgaaaaagttgttaaaaatcctacttctaaattaataaacatttatatataa

SEQ ID NO: 8276 - DNA, 375 bp, Staphylococcus epidermidis; identical to SEQ ID NO: 3909

SEQ ID NO: 8277 - DNA, 777 bp, Staphylococcus epidermidis
atgaataaaattcaaatttgtaatcagattgaacttaactatattgatgaaggcgaaggcatccccatcattttaattcatggattagatggaaacttggcaggatttaaagatttaaaaaatgaactcaagaagcagtatagagtaattacttatgatgtcagaggtcatggaaaatcttcacgaacagaatcatatgaattaaaagatcatgttgaagatttaaatgatttaatgggagcattaaatatcgattctgcacatattttaggacatgatatggggggcatcattgcgagtgaatttactgaaaaatatcaatataaagtgattacattgacaattgtttcggccaaaagtgaagacattgcaaatggtttcaacaaattaatggttgattaccaagaagaattagcaggctttaataaatctgaggcaatgattattttattctctaaattatttaaagagaaagataaagcaatgaaatggtatcaaagccaaaaattatacaatagaccaactccggaagaaagtgcaattgcagtacgtgcattgcttaatattaaagatttaactcgtgttcatcataatgtgtccatacctactttaattgtgaatggtaagtatgacccactcatacaaaataaaagtcattatgatatggatcaatattatgatcaagttacaaaaattgtatttgataattcaggacatgcaccacatatcgaggaaccagaaaaattcctgaaactctacttagattttgttagttaa

SEQ ID NO: 8278 - DNA, 720 bp, Staphylococcus epidermidis; identical to SEQ ID NO: 6544

SEQ ID NO: 8279 - DNA, 123 bp, Staphylococcus epidermidis; identical to SEQ ID NO: 3912

SEQ ID NO: 8280 - DNA, 510 bp, Staphylococcus epidermidis; identical to SEQ ID NO: 3913

SEQ ID NO: 8281 - DNA, 798 bp, Staphylococcus epidermidis
atggcaatggatttaattactaaacaagacggtacaacattacactatagtactatgggacaaggatatcctgtcgtactcgtgcataccgcttttgataattatgctgtttttaatgatttagctaaggtattagcaaagtcttttcaggttgtgcttatcgatttgagaggacatggttactctgataagcctagaaatatagagttttatgactttgctgacgatataaaatttttattagatgctatatatatagatgaagcagcatttattgggcacgagatgggggcacttattgctgctgatatgtctgttagaaatcctggctatatatcctcaatcacattagttaatcctacttcaatagaaggtgaattgcctgaagaacgcttgttcagaaaatatgcgcataaaatacgtaactgggaagatgataagcaagaaaaatttttagataaacgtagatattataaagcgcgtaagatgaataaatttttaaagcatgtcgttgatacaaatagtatttctactaaagaagaaattcaagctgttaaagatgtcttcaaatctgaaggtattgcagatgttttcaagcatgttcaagttcctacgcttattgttgctggagaacacggagaacgtacaactacactagaagctaaagaagtcgcagatttgattcaacactgtgaatttaacgtctatcaacattcaagtgcatatccttttgttgaagaacaggctcaatttactcaagagacaacaaacttcattcaacaacatgcacctaaataa

SEQ ID NO: 8282 - DNA, 729 bp, Staphylococcus epidermidis
atgaatttaaactgcattaaggctatcgtctttgatttagaaggtactctattagatagagtaaaatcgcgtgaaaagtttatagaagagcaatatgaacggtttcatgattattttattcatgtgcaattagcagattataagaataaatttattgaattagacgatgatgaagacaacgataaacctgatctatataaggaaatcattaaacaatttcatatcgaccgtcttaaatggaaagatttatttaatgactttgaaatgcatttctatcgttacgttttcccttactatgatactttgtatacattagaaaagttatcgaaacatcattacatgattggtgtgattgcaaatgggaaatccaaaattaaacaatttagattgcattcattgggtattatgcacgttattaattatttaactacttctgaaactgtaggctatcgtaagccacatcctaaaatctttgaagatatgattgatcaattgggggttaaaccatctgaaataatgtatgtcggagatgatgcattaaacgatgttgctcctgcacgtgcaatggggatggtaagtgtgtggtataaacaagaagatgcagaattggagccattaacagaagaagtagattatacgattactaccatagaggaattgcttaaaattttaccagataattttgaaacagaaggagaagaacaacatggcaatggatttaattactaa

SEQ ID NO: 8283 - DNA, 945 bp, Staphylococcus epidermidis; identical to SEQ ID NO: 3916

SEQ ID NO: 8284 - DNA, 888 bp, Staphylococcus epidermidis; identical to SEQ ID NO: 3917

SEQ ID NO: 8285 - DNA, 756 bp, Staphylococcus epidermidis
atgatgaaagaacgcttcagtcccaaaacgctttctgacattaccggagttagtatacgcacgcttcattattatcatgaaaaggggttactcgtgccacaacaaatgagtgctaatggataccgatattataatgttcaagatatttcaaagttacaatatattctctttttaaaggaattagatttaacattaaagcaaatacagacgtattttgaaggtgatagtgattttagaactaaaatattacatgataatttttatcacattgttaaaaaaagagatcgcttaaacgatattatccgtacgttagaacatcattttcacaaagataacgatgagattgaggtaactacaatgcaaaatttcaatttaaatgaacagtatgaaaaagaagcagcaagtaagtatggagatactcattattatcaagcatataaagataaacaaaaatgtaaggatgaatcagaacagcaaaatcattttgaggaaattaataagcaattaaatatgttttttgacgaaatgaatcaactatacttaaacaaagtttctatacttgaagcaagtggaaaaactaagaaattacaatgtattttgaaagaacaagttcctaattgtgacaatcaatttttagaatatatagctcagatttatattgaggacgagcgatttgtaaagtttattaacaagcaacgtgaacgtggtttgaatttatacatttctgacgcgataaaaacatttattaaattataa

SEQ ID NO: 8286 - DNA, 636 bp, Staphylococcus epidermidis
atgttatcaatagaaaaattatatcaaattctatatcaaaatatgggccctcaatattggtggccagcagaaacgccaatagaaatgatgcttggggcaattctagtccaaaatactaattggaacaatgcagatatagcgttatcaagattaaaagaagaaacttcttttaatgcacagacgatattgaaaatgcctttagaatcgttgcagcaagtgatacgttcgagtggtttctataaaaataaagctaaggctatacaggcattgttactatggttaaatcaacatcattttgattatagtagtatagctaagttatacggtgatagcttaagaaaagaattactcaccatccgtggtataggtgaagagaccgccgatgtcttaatagtatatatttttaaaggtaaagaattcatacctgatagttatactagacgtatttttagaaaattgggatatcaacatacagaaagttatcataaattgaaacaggaattaacacttcctgaatcattttcaaatcaagatgcaaatgagtttcacgctttattagataattttgggaaaaattattttaatggtaaggggaaacaacgctatacctttttagatacctattttaaaaaataa

SEQ ID NO: 8287 - DNA, 180 bp, Staphylococcus epidermidis
atggaaacttcagttcttatccccacaaatgatatttcacgacatgtaaatgatattgtagaaacaattctagagactgaattcagacatcatcgtgatgcaatatcataccatccaaaaataatgttaaaagtagttttatatgcctatacccaatctgtgttttcaggacgtagatag

SEQ ID NO: 8288 - DNA, 153 bp, Staphylococcus epidermidis; identical to SEQ ID NO: 2933

SEQ ID NO: 8289 - DNA, 156 bp, Staphylococcus epidermidis; identical to SEQ ID NO: 2934

SEQ ID NO: 8290 - DNA, 483 bp, Staphylococcus epidermidis; identical to SEQ ID NO: 2935

SEQ ID NO: 8291 - DNA, 276 bp, Staphylococcus epidermidis; identical to SEQ ID NO: 2936

SEQ ID NO: 8292 - DNA, 1119 bp, Staphylococcus epidermidis
atggtttatagcgcaagcatggttgcagctacaaaaggtacgttaaccgggggagtaccagtttccggaacatacttctacaatcgacaacttttatacgttatcatgagctttgttatcgtattttttatggcttttattatgaatgttaaagtattaaaaaagcctaatgttcaaaaaggtatgatgattggtatttttatacttttactactaacattagtaataggaaaaaatatcaatggttctaaaagttggattaacttagggttcatgaacttacaagcttcggagttattgaagatttcaataattctatacataccatttatgattgaaaagaagatgcctgcggtgaggcataatataaaattaatattaggaccaattttgtttgttgtaacttgtttgatacttgttctttttcaaaaagatgttggtcaaacaatgctgattgtgatcatattcttctcaattattttttactcaggtatcggtgtgcagaatatgttaaaatggggcgctttggtagctattggttttatcatcgtagctacatttatgttcatgttagatatggttccaagttatttgcaagcacgttttagtacgttaaccaatccatttagtcaagaatcaggcacaggatatcatatttctaattctcttttggcaattggcaatggtgggttgttcggacgtggtctaggaaatagtattatgaagcttggttatttgccagagccacatacagactttatatttgctattatttgtgaagagatgggattaatcggtggcttaatcgttttaattttagagtactttattgtatatcgcgctttccaacttgctaataaaacgcaatcgtatttttataaattagtttgcgttgggatagctagttatatcggaagccaaacattcgtaaatatcggtggtatttctgctacaattccacttactggtgtaccgttaccatttattagttttggtggttcatcgatgattagtttaagtatagctatgggattactacttattacagcaaaacagataaaacaagatgataaacgactgaaacaacgtaaggtagatattaaacgtcgatataattaa

SEQ ID NO: 8293 - DNA, 3450 bp, Staphylococcus epidermidis
ttgaaacaaataaagaaattacttgttgctaaccgtggtgaaatcgccattagaatttttagagcggcagcagaattaaatatcagtacagtagcaatttattctaatgaagataaaagttcgttacatagatataaagcagatgaatcctatctagttggaagtgatttaggacctgctgaaagttatttgaatatcgaacgtatcatcgaagtagctcttcgcgcaggtgtcgatgcaattcatcctgggtatggttttttaagtgaaaatgaacaatttgcacgccgatgtgctgaggaaggcattaaatttataggtccgcatcttgaacatctagacatgtttggagataaggttaaggctagaacaactgctattaacgctaacttacctgtaatcccgggtacagatggtcctattgaaagttttgaagctgcagaacagtttgctaatgaagcaggttacccacttatgattaaggccacaagcggtggcggtggtaaaggtatgcgaatcgttcgtgaatcaagcgaattagaagacgctttccatcgtgcgaaatcagaagccgaaaagtcatttggtaatagcgaagtttatatcgaaagatatattgataatccaaagcatatagaggttcaagttattggtgatgaattcgggaatatcattcatttgtatgaaagagattgctccgtacaacgacgtcatcaaaaggttgttgaagttgcaccttcagtaggtctttctaacaaattaagagagcgaatttgtgatgccgcaattcaactgatggaaaatataaaatacgtcaacgctggaacagtagaatttttagtttctggggatgaatttttcttcattgaggttaatccacgtgttcaagttgagcatacaattactgaaatgattactggtatagacattgtgaaaacgcaaattttagttgctaatggagaatcgttatttggagataaaatctctatgccacagcaaaatgaaattcaaacattagggtatgcgatacaatgtcgtataacaactgaagatcctactaatgattttatgccagattctggcacaattattgcatatcgatcaagtggcggttttggtgtgagacttgatgcaggggatggattccaaggtgcagaaatttcaccttactacgattcactattagttaagctttctacacatgccgtttcatttaaacaagctgaagagaaaatggaacgttcattacgcgaaatgcgaattcgtggcgtaaagacgaatattccatttctcatcaatgttatgcgtaatgataaatttagaagtggtgattatactactaaatttattgaagaaacacctgaacttttcgatattgcaccgacattggacagaggtaccaagactttagagtatattggtaatgtgacgataaacggatttcctaatgtagaaaagcgtccaaaaccagaatatgaatctaccaaaatcccaaaaatttctcaaaagaaaatcaatcagttatttggaacaaaacaaattcttgagcaacatggaccaacaggtgttacaaattgggttagagaacaagaagatgttttaattaccgatactacatttagagatgcacaccaatctttacttgcaacacgtgtaagaacaaaagatatgatgaacattgcatctaaaactgctgaagtttttaaagatagtttttcattagaaatgtggggtggtgcaacatttgatgtcgcctataatttcttgaaagagaatccatgggaacgtttagaaagattgcgcaaagccattccgaatgtgttattccaaatgttattacgagcttcgaacgcagtaggttataaaaactatcctgataatgtaattaagaaattcgttcatgaaagtgcaaaagctggtgtagatgttttccgtatattcgactcattgaactgggttgatcaaatgaaagtagcgaatgaagctgttcaagaagctggaatggtatctgagggtacaatttgctatacaggtgatattttaaatgctgaacgttccaatatttatactttagattattacgttaaaatggctaaagaactggaaagagaaggattccatatattagcaattaaagatatggctggtttattgaaaccgaaagcagcttacgaattaattggtgaattacgtgaggcaacacatcttccaattcatttacatacacatgatactagtggaaatggattgttgacatataaacaagcaattgatgctggcgtagatattatagatactgctgttgcatctatgagtggtttaacgagtcaaccaagtgcaaattcattatattatgcactaaatggatttccacgtaatttaagaactgatattgatgggttagaagagttgagtcattactggtctgtagtcagaccttactatgcagactttgagagtgatatcaaatcaccaaatacagaaatttatcaacatgaaatgccaggtggccaatattcaaacttaagtcaacaagctaaaagtttaggattgggcgaacgttttgatgaagtcaaagagatgtatcgtcgtgtcaacttcctgtttggagatcttgtaaaagtaacaccatcttcaaaggtagttggagatatggcactatatatggtgcaaaatgatcttgatgaagatacggtcatcaatgatggttataaattagatttcccagaatctgttgtgtcattctttaaaggtgacattggacaacctgtcaacggattcaacaagaaattgcaagatgttattttaaaaggacagcaaccaattactgaaagaccaggtgaatacttggagccggtcgattttgaagcaatccgtcaagaattaagcgacatacaacaagacgaggtaacagaacaagatataattagttatgtactttatccgaaggtatataaacaatatattcaaacgaaagagcaatttggtaatgtatctttactggatacaccgacattcttatttggcatgcgtaatggtgaaacagttgaaattgaaattgatactggtaaacgtctaattattaaattagaaacaatcagtgaaccagatgaaaatggtaagcgtacaatttattacgctatgaatggtcaagcaagacgtatctatattcaagatgaaaatgttaaaacgaatgctaatgttaaacctaaggcggataaatcaaatccaaatcatattggtgctcaaatgcctggttctgtaactgaagtcaaagtgtctgtaggcgatgaagttcaagctaatcagccattattaatcactgaagcaatgaagatggaaacgacgattcaggcaccatttgatggaattattaaacaaatcaatgttgctaatggagatgccattgccacaggagatttattagtggaaattgaaaagcaatcataa

SEQ ID NO: 8294 - DNA, 909 bp, Staphylococcus epidermidis
ttgtttagaaagcaaaaccttaaatggttaggtgttttagctacgattattatgacctttgtacaattaggtggcgccctcgtaactaaaacgggatcagaagatggttgtggctcgtcttggcctttatgtaacggcgctctacttccagaaaatttaccaatacaaacaattatagaactgagtcatcgtgcagtatcagccatttcacttatagttgtattatggcttgtaattacagcttggaaaaacattggatatattaaagaaatcaaaccactctctattattagtgttggttttttattagttcaagcacttgtaggtgctgctgctgtgatatggcaacaaaatccttatgtattagcgctacattttggtatttcacttatcagtttctcttctgttttcttaatgacattaattattttctcaattgacaaaaaatatgaagctgacattttatttattcacaaacctttacgtatcttaacttggttaatggctatcatcgtatacttaactatttatacaggtgctttagttagacatactaaatcaagtcttgcttatggtgcttggcctattccatttgatgatatcgttcctcataatgcgcatgattgggtacaattttcgcacagaggtatggcgttcatcacttttatctggattatgattacatttatacacgctattaagaattattcagataatcgaactgtacgttatggttatactgcatcatttatacttgttatccttcaagttattacaggtgctttatcagtcataactaatgtcaatttaattattgcgttattccatgctttgtttatcacttacttattcggaatgattgcttattttattttactaatgttaagaacgacgagaagtctaaaataa

SEQ ID NO: 8295 - DNA, 912 bp, Staphylococcus epidermidis
atgaacaaagatcaaactttgtcacatactacgggccgtgtatccttcaaagaattacaacaaattattaaaatgggccttgttcaaggtaatttaatacctgcttttgcaggcgcatggcttgcaatagtaatgacaaaccattccttcctatcttccattccacaaatactattgatgctagttggctctacgctaattatggggggcgcttgtgctttaaataattattatgatcaagatattgatcgcattatgcctagtaagcaaagtagaccaacagtaaatgatagaatatctgatagaaacttattaatgttaagttttgggatgatgttaataggtgaagcatgtttattcttattaaatataccttctggtgttttaggattaattggtattgttggatatgtatcttactattcaatttggtctaagcgccatacaacttggaatactgttgttggaagttttcctggagctgtaccaccattaattggttgggtagctatcgatggatcattaagtttagcagcagtagcactctttttagttgtcttttgttggcaacctatccatttctacgctctagcaattaaacgtagtgatgagtatgcgcttgcaaatattcctatgttaccatcagtgaaaggtttcaaacggacaagagtaagcatgtttatttggttagtgttattattaccattgccattcttattatctaatttaggtgtaacttttgttgttattgctacactacttaatttaggatggttagctttaggttttacaacgttcagaaaagaatctaatcaaactaaatgggcaacgcaaatgttcgtttattcattgaactacttagtagtattctttgcactcgttgtagttgtttcattaatcaagatgatataa

SEQ ID NO: 8296 - DNA, 462 bp, Staphylococcus epidermidis; identical to SEQ ID NO: 2941

SEQ ID NO: 8297 - DNA, 1053 bp, Staphylococcus epidermidis; identical to SEQ ID NO: 2942

SEQ ID NO: 8298 - DNA, 435 bp, Staphylococcus epidermidis; identical to SEQ ID NO: 2943

SEQ ID NO: 8299 - DNA, 927 bp, Staphylococcus epidermidis
atggctcattcaaaaaaatggtttattaatggtacgttgacaacagccggtattataagcagtctattttactttttaaaaaataaaaataaatcaccgcaacaattaaaatctattccacctttcttctcaggacaagcaccttacatatttgcacatagaggtggcatggcaatgcgaccagagcaaacacagttggcatttgataatgctgttgaatatggattggatggctttgaaacagatgtacgactaactaaagatgaacaactcattgtttttcacgatgcacttgtcgaccgtacaactaatggttcaggtaaagtgagtgaacatactctagctgaactaaaacgattagatgcgggatatcattttactgacatcaataatcaaacaccttatcgcgggcacgataaagctaagattttatcattcgaggaactgcttgaattgtaccctaatatgtatatcaatgtggatttaaaagatgcgccagacacatatgaaggtcgtatcgcaccaaaagtgatttacgataatatcatcaaacatggggcgcaacatcgagtgctcgttacaagcttccataaaaaacaaattcaacgtttcactgagtataaccaagctgacattgctatcggtgctagtgaaggcgaagttgctgaaggttttattaaatttaacggcatgttaggtcacacatttaaaccacaagcagacacattccaaatgccagttgcatataaaggaatttcattaacttctaagcgtttcattcaatggcttaacttaaataatattgtacccggttactatggtgtgaatagtatagatttaatgacagatttatatcataaaggtgttcatactttagttacagatcgcccagatttaggtcaacaatttaaagaaactttaaaataa

SEQ ID NO: 8300 - DNA, 252 bp, Staphylococcus epidermidis; identical to SEQ ID NO: 2945

SEQ ID NO: 8301 - DNA, 390 bp, Staphylococcus epidermidis; identical to SEQ ID NO: 2946

SEQ ID NO: 8302 - DNA, 543 bp, Staphylococcus epidermidis; identical to SEQ ID NO: 2947

SEQ ID NO: 8303 - DNA, 486 bp, Staphylococcus epidermidis; identical to SEQ ID NO: 2948

SEQ ID NO: 8304 - DNA, 1134 bp, Staphylococcus epidermidis
atgaaaagtgttggactgataactgaatataatccttttcataacgggcacttatttcacgctacattgtcaaaacaacgctctgaaactaatgtaactattgctattatgagtggcaattttatgatgcgtggagaaccagcaatctaccataaatttaaacgtactgaaatggctttatccgccgtagatttggtcgttgagctaccattgataggtagcctatcttctagtgatacctttgcggaaatagctattaaaacagctcagtatctcgatatagatattatatcttttggcagtgaaagtgcatccttaaaagatttacaatatcttgcaacacaaatgattgactatgaaaaacatccagattttaaagagaaattaaaacaaggtaaaagctatccacgaatcttaagtgagttaacacataacgatacacttttacaatctccaaacaatattttaggaataagctaccttaaagcaatgcagcaatttgcgcctcacatgtcagcattaactattaaaagagaaggttcacttcatcatcaaaaagtaattgatcaccatcattttgcaagtggaacatctattaggcgttcactaatgaatgataatgtagactggaaaaatgtggtcccaaatcaaatacaatctttatattgtaaacctcatactacggttgaggatacatttccttttatcaaacaccaattaattacacaaccaaaagagagccttcattctatttacacaataaatgagggatttgaaaatcgcttgcaaacaatgattcatcgaagcgattcctttgagtctctattatcaaaccttaaaacaaaacgttatacgcagacatatattcaacgtgtattaatgaatgtgttattaaatataacaaaagatgatgttaacaaggaaattaacgctgttagagtattaggaatgagtgaaaaaggacgctcatatttaaaatatttaaaagctaattatccaaatcgtcactacattactaatgtaaatcaaaagactgcacactattttaaaaatgaaattaaagcgactcatgtatataatctattaagtaatcaatcacagacagactttaacacacccttagtacgcatttaa

SEQ ID NO: 8305 - DNA, 555 bp, Staphylococcus epidermidis; identical to SEQ ID NO: 2950

SEQ ID NO: 8306 - DNA, 174 bp, Staphylococcus epidermidis; identical to SEQ ID NO: 2951

SEQ ID NO: 8307 - DNA, 2484 bp, Staphylococcus epidermidis
atgaaaaaatctagtaaattttcaaaagattttcctactagaaaaaatcattacgcaattagaaaattcacagttggcactgcttcgattatcgtaggatcattcttatttttcggacaaacacaagctcatgctgaacaggctgaagaattcgaaagagtaacaactggtacagttgatacaggtggacagcctgctagagcagatcaaggacaagaaggaccacaagcaggcgcggatacgcacaatacagcaagtcaacctggtgttacaggtcaagatgcaccaaatgaaaatcatgctggtgaccaaaatgctgcagtaacacatccggctaatcaagaaaataatgcacctcaagttggggctggtactcctggcgctgagaacacaccacaagccggtggtgaaagtcataatcaagatactgcagtaacttcagcaggtactaatggggaacaaaatggtggtaaaccagctacgtcaacaactggtcaagatgccgcgcaatccaatggacctcaaggtacttcagtagcccaacctggtaatgatgcttctagccaaggtcatgatacacctcaagctgatgctggtactcataatacagaaggccaacctgctgtaactactggtgagcaagctggtggtaagcctgctgcaacgaaacctgaaggtgccagtgcagaaactgcgccagcgcctaataatgctgatgaaaatcacgctcaaccttcaccgcaaacaggaggtactacagcaacacaagctggacaagtaaaaccatccggtgattctacgcctaccggtgagccaaacaaagcagacgatcaaggtacacaaattaaacctacaagtaaccaaggtactacagcaacaactaatgaaactggaaatcaaaaaccaagtggtcaaacaggtaatactgagaacacgcctaatgatggtactcaattaaaacctaataatgacccagctgcgactggtacgccaaatactaatggagaacaaactggacaacctaatgcaacagtaacaccaggacaaggtaatgaagagattaacggagctagtaaacctggagaagtgtctccgaaacctgaagaaaacaatccaactgccactgaacctggtacaactgcacctgggaatactaatcaagacacacaagtaaaacctaatacagatcagactgctactggtactccagctggtactgataatcaaaatacgcaacaaggcaatactgaacaaaataaccaaaatgctcaaccatcagcacctggaacaactgatcaatccggtgctacggttaaacctagtactacacctaatcaagacgctgaagttaaacctagtactacacctaatcaagacgctgaagttaaacctaatccagatcaaaataatacaccaactaatggtcaagacgggaatcaaacaggtcaaggtactcaagtaaaacctaataacgatcaaacggcaactggtactcaaggtgccactggtaatcaaaatgctgaacaaggtaatactgaacaaaataaccaaaatgctgaaccatcagcacctggtacaactgatcaagccggtgctacggttaaacctggtactacacctaaccaagacgctgaagttaaacctaatacagatcagactgctactggtactcaaggtgccactggtgatcaaaatgctgaacaaggtaatactgaacaaaataaccaaaatgctgaacaaggtaatactgggcaagagggttctaatcctaatcaaagtggtcagttaggtgctacggttaaacctggatctgctccaaatcaagatactgaggtaaaacctaatccagatcaaaataataacccaactactgggcaagacgcgaatcaaacaggtcaaggtactcaagtaaaacctaataacgatcaaacgacaactggtactccagctggtactgataatcaaaatacacaacaaggaaatactgaacaaaacaatcaaaatgctgaacaaggtaatactgggcaagagggttctaatcctaatcaaagtggtcagttaggtgctacggttaaacctggatctgctccaaatcaagatactgaagcaacccctaatccagatcaaaataatacaccaactaatggtcaagacggggatcatacaggtcaaggtactcaagtaaaacctaatccagatcagactgctactggtactcaaggtgccactggtgatcaaaatacgcaacaaggcaatactgaacaaaataaccaaaatgctgaacaaggtaatacaggcggtacagataaagatgctaaagtaaatactaatgatgatgaaacaaaaacagatgttaaaaatgatactgaattacctgaaacaggactaagtaatgaatatgattatacaactacagtatttggttctatcgctttaatatcttcacttttattactaagacgacaaagaaaagaatctaaataa

SEQ ID NO: 8308 - DNA, 138 bp, Staphylococcus epidermidis
atgatgtattctttaaaattgatatatcctttgaaaaacaatcaaatttgtatttcttttatttcagcgattttaattttaaaacgtatgattattgttttgaaaacagaaaaaatattcaataattattttatatag

SEQ ID NO: 8309 - DNA, 741 bp, Staphylococcus epidermidis; identical to SEQ ID NO: 2953

SEQ ID NO: 8310 - DNA, 1059 bp, Staphylococcus epidermidis; identical to SEQ ID NO: 2954

SEQ ID NO: 8311 - DNA, 2403 bp, Staphylococcus epidermidis; identical to SEQ ID NO: 2955

SEQ ID NO: 8312 - DNA, 927 bp, Staphylococcus epidermidis
atgggaaatgtcgtatacaaactcacgtcaaaagaaattcaatcattgatggctcaaactacttttgagacgacgaagttacctcaaggtatgaaagctcgtacgagatatcaaaatactgttatcaacatctatagttctggcaaagtaatgtttcaaggtaagaatgctgatcaacttgcgagtcaattgctaccagataaacaatcaacaactggcaaacatacatcatcaaatacaactagtattcaatataatcgttttcattgtattggaagcgatgaagcaggcagtggcgactattttggtccattgactgtatgtgcagcttatgtgagccaatcacatatcaaaatcttaaaagaacttggtgtagatgattcaaaaaaactaaacgatactaaaatcgtcgatcttgcagaacagctcattacctttatcccgcattctttattaacattagataatgttaagtataacgaacgacaaagtataggatggtctcaagttaaaatgaaagctgtcttacataatgaagctatcaaaaatgtgcttcaaaaaattgagcaagatcaactggattatattgttattgatcaatttgcaaagcgagaagtttatcaacattatgcattatcagcattaccttttcctgacaaaacaaaatttgaaacaaaaggtgaatctaaatcactagcaatcgcggcagcaagcattatttctcgttatgcatttgttaaacacatggaccacatctctaaaaaactccatatggaaataccaaaaggagcaagtaacaaagtagatttaattgccgctaaagtcattcaaaaatatgatattcaacaacttgatactatttcaaaaaaacattttaaaaacagagataaggcaattcatctaatgaatcaaaaatacaataaataa

SEQ ID NO: 8313 - DNA, 267 bp, Staphylococcus epidermidis; identical to SEQ ID NO: 2957

SEQ ID NO: 8314 - DNA, 522 bp, Staphylococcus epidermidis; identical to SEQ ID NO: 2958

SEQ ID NO: 8315 - DNA, 1710 bp, Staphylococcus epidermidis; identical to SEQ ID NO: 2959

SEQ ID NO: 8316 - DNA, 2349 bp, Staphylococcus epidermidis
atgagacaaaaaacattagatgtcttggaatttgaaaagattaaatcatttgtggctgatgaaactataagtgatttaggtcgtgaaaaagtacaagagatggctcccgctagtaatttcgatacagtagaatttcaaatgaatgaaacagatgaaatttcacaaatctataacaagcatcgattaccaagcttaagtggtctagcaaaagtgtctccacttgttcatagggctagcataggaggcgttttaaatgtgggagaattaaacagaattaaacgcctagttcaagtgcaaaatcaatttaaaacattttacaatcaaatgctagaggaagatgaagaggttaagtatcctatactgcatgataaaatgaatcatctaccgatacttacagatttatttaaagaaattaatgaaaaatgtgatgcacacgatttatttgaccatgcgagttatactttacaaagtattagaagtaaaatttcaagaacaaatcaacggattcgtcaaaatttagatagaatagtgaaaaatcaagggaatcaaaaaaaactatctgatgcaattgtaacagtaagaaatgatcgcaatgttattccggtgaaagctgaatatagacaagatttcaatggtattgttcatgaccaatcggcatcaggacaaacactatatattgaaccgaattctgttgtagagatgaataatcaaattagtcgtttgcgtaatgatgaagcagttgaacgtgaacgtatattgactgaattgacgggattagtttcggcggaatctgatgcattactcgttgctgaatcggtcatgggtcaaatcgattttttaattgctaaagctcgttatgcgcgcactataaaaggaacaaaacctacatttaaagaggagcgaacgatatatttacccaatgcatttcaccctttattagacaaagatactgttgtagcaaatacaattgaatttattgacgatgtagaaactgtcattattactggaccaaacacgggtggtaagactgtcactttaaaaacgctaggtttgataattgtcatggcacagtcaggattgttaattcctacactggatggaagccaattaagtatctttgaaaatgtgtattgtgatattggagatgaacaatctatagaacaatcattatcaacgttttcatctcacatgaaaaatatagtggaaatattacaggatgcagatcaaaatagtctaattttatttgatgaactaggcgcaggtacagatccaagtgaaggtgcggcactcgcaatgagtatcttagattatgtacgtcgtttaggatctttagttatggcgacaacacattaccctgaattaaaagcttatagttataatcgtgaaggtgtcatgaatgcgagtgttgaatttgacgttgatactctgagtccgacttataaattattaatgggtgttccagggcgatctaatgccttcgatatttcaaaaaaacttggtctaagtctcaacatcattaataaagctaagacaatgatagggacagacgagcaagaaatcaatgccatgattgaatcattagaacacaattcaaaacgtgttgaccaacaacgaatagaattagatagacttgtgagagaagcacaggaaactcacgatgccttgtctaaacaatatcaacagtatcaaaattatgagaaatctttgatggaggaagctaaagaaaaagccaatcagcgtgtgaaatctgcgactaaagaagcggacgaaattcttaaagaacttagaaatctaagagatcataagggcgctgaagtaaaggaacatgaattaattgataaaaagaaacaacttgatgatcaatatgaggcaaaatcaattaagcaacatgttcaaaagaaaaagtatgatacgattcatgctggagatgaagtgaaagttctatcttacggtcaaaaaggtgaagtgcttgaacttgtaggtaacgaagaagcagttgtacaaatgggaattattaaaatgaaattacctattgaagatttagaaaaaacgaaaaagaaaaaagaaaaacctacaaaaatggtaacaagacaaaatagacaaactattaaaacagaacttgatttaagaggatatcgttacgaagaagctttaaatgaattagatcaatatcttgatcaggcggttttaagcaattacgaacaagtttatattattcatggtaaaggtacgggagcacttcaaaaaggtgttcaacaacatttgaaaaaacataaaagcgttagacaatttagaggaggtatgcctagtgaaggtggatttggtgtcactgtggcagaactcaagtaa

SEQ ID NO: 8317 - DNA, 315 bp, Staphylococcus epidermidis
atggcaatcgtaaaagtaactgattctgattttgatagcaaaattgaatctggtgttaaattagttgatttctgggcgacttggtgtggaccttgtaaaatgattgcaccagttttagaagaactagcaggagactatgatggtaaagctgacatcttaaaattagatgttgacgaaaacccatcaactgcagcgaaatatgaagtaatgagtatcccaactttaattgtatttaaagatggcgaaccagttgataaagttgtaggtttccaacctaaagaaaacttagcagaagtattagataaacatctataa

SEQ ID NO: 8318 - DNA, 1785 bp, Staphylococcus epidermidis
ttggaggaatatcaaaagaaaattaaagaaaaattaaacgtagtccctttagagccgggttgttacttaatgaaagatagaaatgatcaggttatatatgtggggaaggcaaagcgtttaagaaatcgtctacgttcttattttacaggcgcacatgatgctaaaacaacccgtttggttggagaaatacgtaactttgaatttatcgtgacatcaagtgagacagaatcgctactgctagagcttaatcttataaaacagtatcaaccccgatataatattttattaaaagatgataaaagttacccttttattaaaattaccaaagaaaagcatccacgattacttgttactcgtactgtaaaaaagaattcaggcaaatactttggtccataccctaatgcatattctgcacaagaaacaaagaaattacttgatcgtatctatccatttagaaaatgcgataatatgccagataagctgtgtctttattaccatattggacaatgcatgggaccgtgtgtctatgatgttgatttagagaagtatgctcaaatgacaaaagaaattacggactttctaaatggggaagataaaacaattttgcatcatttagaagaccgcatgaataaagcgagtgaacagttagattttgaacaagcaaaagaatatagagatatgattcaacacattcacaatttaactaaaaaacaaaagattatgtcttcagataatacaattagagatgtttttggttatagtgtttctaaaggctggatgtgtgttcaagtcttcttcgttagacaaggtaatatgataaaacgtgatgctacaatgataccgttacaacaaacagaggaagaagaattttatacttttataggtcaattttatagtttaaatcagcatctattacctaaggaagttcatgtacctaaaaatcttgataaagacatcattcagtcagtggtagatactaagattgttcaaccagtacgaggagctaaaaaagacatgattaatttagcgaatcacaatgctgaagtacaactcgataataaatttgaattaattgctagagatgagtcaagaacaatcaaagcaattgaagaattaggagagcgtatgggtatccaaacaccaataagaattgaagcttttgataattcaaatattcaaggtgttgatccagtttcagcaatggttacatttgtagatggcaaacctcataaaaaagattatcgaaaatataagattaaaacagtggaaggacctgatgattataaatctatgagagaggtcgttcgtagacgctatacacgtgtactcaacgaggggctacctctaccagatttaataatagttgatggtgggaaaggtcatatgaatggtgtgatggatgtactcgaaaatgagcttgggctagatataccagttgctggtttacaaaaaaatgataaacaccaaacatctgaactactttatggagcaagtgctgaaatagtacctttaaaaaagaacagtcaagcattttatctattacaccgcatacaagatgaggttcatcgatttgcaattacattccaccgacaaacacgtcaaaaaacaggtctgaaatctgttctagatgacattgatggtattggaactaagagaaaaacttcattattacgtacatttggatcgattaagaaaatgaaagaagcatcctttgatgaattacgacaagcaggcttgcctgaaaaggttgctaaaaaccttcaaaacgcgttacaaaacaaataa

SEQ ID NO: 8319 - DNA, 615 bp, Staphylococcus epidermidis; identical to SEQ ID NO: 2963

SEQ ID NO: 8320 - DNA, 1767 bp, Staphylococcus epidermidis; identical to SEQ ID NO: 5502

SEQ ID NO: 8321 - DNA, 843 bp, Staphylococcus epidermidis; identical to SEQ ID NO: 2965

SEQ ID NO: 8322 - DNA, 804 bp, Staphylococcus epidermidis; identical to SEQ ID NO: 5500

SEQ ID NO: 8323 - DNA, 588 bp, Staphylococcus epidermidis
atggaagatattgttattgcaactaataatcaaggtaagataaacgattttaaagctatttttaaaaatcaacatgttattggaatttctgagttaattgaggattttgatgtagaagaaacaggtgccacatttgaagaaaacgctaggttaaaatccgaagcggcagcacatgcattaaataagcgtgtcattgcagatgatagtggacttgaagtgttcgcattaaatggagaaccaggcgtatattcagctcgctatgcaggattaggtaagaatgatgaagataatattgaaaagttgttaacgaacttagaagatgttcaagaccgtcgtgctcaatttgtttgtgtgattagtatgagtgcgcctaatgaaaaaacaaaaacatttaaaggaacagtttctggagtgataacaactgaacgacatggaaagaatggttttggttatgatccaatattttttgtcccagaattaaataaaacgatggcggaaattacaaatgatgaaaagggtaaaatcagtcatcgtggaaatgctattcgactgttaaaagaatatttagagggtgaacaacatgtctaa

SEQ ID NO: 8324 - DNA, 510 bp, Staphylococcus epidermidis
atgtctaagtggattattcttagtgataatcacaaagaaacaggtatcttatatcatatttatgaactacataaagatgcagataaatttttacatttaggggattctgaatttagttataatgacacagaacttagtttgtatcagcgtgtgaaaggtaattgtgatttttatccagagtttttagaagaagaaatcactgaagaaaacggaatccgtgccttttatactcatggacatctttatcaagtaaaccaaacacgaatgaaactggctgaaaaggcaaaagaattaggatgtttgtttgccttttatggacatacacatgttgcaaaatatgagcaaataggtggtatccatgtaattaatcctggtagtatttctcaatcacgtagtcaaattgaagaaacttttgccgaactcgtatacaaggaagatgaaaataccatcattttgaattttagaaatagagaaaatcagatcattgaaacagttaagattgaattttag

SEQ ID NO: 8325 - DNA, 132 bp, Staphylococcus epidermidis; identical to SEQ ID NO: 5497

SEQ ID NO: 8326 - DNA, 135 bp, Staphylococcus epidermidis; identical to SEQ ID NO: 2971

SEQ ID NO: 8327 - DNA, 135 bp, Staphylococcus epidermidis; identical to SEQ ID NO: 2972

SEQ ID NO: 8328 - DNA, 135 bp, Staphylococcus epidermidis
atgtcaaaattagcagaagctattgcaaatacagtaaaagcagcacaagatcaagattggactaaattaggaactagtatcgttgatatcgtagaaagtggcgttagcgtattaggtaaaatcttcggtttctaa

SEQ ID NO: 8329 - DNA, 687 bp, Staphylococcus epidermidis
atgaaattcaaaaatatattatttgatttcgacgatacattagtggatttttatgacgctgagaaaaaagcgttttataatttagcacagaaatacaatcatcagccaactcaacaggatttcgaacattttaagaaagtgaaccaagcgcattgggaagcatttcaacaaaataaattgactaaagatgaagtgctgtcacaacgatttattaattattttaatgactatcaaattcatgtaaatggaaaagaagctgataagtgctttagagctgaattagcaatggcaccagttaaattatttgatcatacattagaagttatacaacaattaaaattaaatcattctctctatatagtaaccaatggtgtaacagaaacacagctacgacgaattgctcagacacaatttaatgaaatatttcaagatgtctttatatctgaaaaagctggatttcaaaagccgatgacagagttcttcgattttgtgtttgaacatatcggagagaataacaggaatcaaactctaattgtgggagattctttaacgtctgacatattaggtggtaaaaatgctaatatatcaacatgttggtttaatattagacaaaaagaaaaccatacgtctattcaaccggattatatcattaatgatttatcagaaatgattcgcattgttgagtga

SEQ ID NO: 8330 - DNA, 441 bp, Staphylococcus epidermidis; identical to SEQ ID NO: 2975

SEQ ID NO: 8331 - DNA, 1614 bp, Staphylococcus epidermidis
atgaagtgtaatacgttaaagttaactgaacaggatcagttcattaataaaataaaaaatagtgaatctcaaattacatctttttatgaatatgatgcagtgaaaaaggaaagcttttatagaagattaaaaacacctaataatggaagggaatttcatttatcacgagtgattaaatcttacatgaatgaattaaagttaacacatcagcagctgaataacatagatgctttagctgatggtgcaaaagtagtgattggtggacaacaagctggtctttttgggggtccactgtatacgtttcataagattttctcaattataactttaagtcgtcaactttctgaggaatatgatactcctattgtacctgtgttttggattgcaggtgaggaccatgattttgaagaggtgaatcatacgtatgcattcaataataaagaaactaccttgaaaaaagtaaagtatcatacgatgacaccaccagatagtaatgtttcaagatatactcctgataagaacgaattaaaagcatcattaaatcacttttttaaagaaatgaaggaaactgtacatactcaagatgtttatcaaatgtgcgtcaatattattaatcaatttgattcatggactgatatttttaagggattgatacatgaagtgtttaaggattatgggattttacttattgatgctcaataccctgaattaagacagatggagaaaccgttgtttaaagagatattagaaaagaggaatcaagtcgatcaatcttttcgtgaaactcagatacgaacaactcaacaacaacttccatcaatgatacaaacagagacaaacacacatttatttatccatgaagacggaatgagacagcttttaaattttgatggcacttattttaaactgaataaaactgagaaacgttacacgaaacaaaatttattagatattatagaaagagagcctgaaagaatttctaataatgttgttactcgtccagttgtagaggaatggttgtttaacacagtagcatttatcggaggtccaagcgaaatcaaatattgggcagaattaaaaggtgttttcgatacgttaaatgtagaaatgcctattgttatgccaagattaagaatcacgtatttgtatgctagaactaaaaagttattaaaacaatataatttatcgatagagtctgtcattgctaatggagtagaacaggaacgtcaacgttttgttcgtgaaaaagcatcaaataattttataaatgaagtagaagaaatgaaaattcagcaacaagaactttataacaatttattcacctatgtggaaaataaccatgacaaccaacttcttttagaaaaaaataatcaaattcatctcaatcagtacgattatttaatcaaacggtacttactgaatattgaaagagaaaatgatataagtatgcgacagtttagagaaattagtgaaacactccatccaatgggtggtctacaagaaagagtttggaatccacttcaaattatgaatgattttgggatagatgtgttcagtccctccacctatccaccactttcttactcgtttgatcatttgattataaatccttga

SEQ ID NO: 8332 - DNA, 432 bp, Staphylococcus epidermidis; identical to SEQ ID NO: 5491

SEQ ID NO: 8333 - DNA, 936 bp, Staphylococcus epidermidis
atgtttcatcatgtgagcgtcatgttaaacgaaaccattgattatttaaatattaaagaagatggtgtgtatgttgactgtacgttgggtggagcaggacatgccctctatttacttaatcaattaaatgataaaggtagacttattgcgattgatcaagatttaacagccatagaaaatgcgaaagaagttttaaaagaacatttgcacaaagtcacttttgttcataacaactttcgagaattaacaaatattttaaatgaattagaaattgaaaaagtagatggtatttattatgacttaggtgtttcaagcccgcaattggatgtgcctgaaagaggctttagttatcacaatgatgcgaaactagatatgcgaatggatcaaacacaatcactttctgcgtatgaagtagttaatcaatggtcttatgaagcattagttaggattttctttcgttacggcgaagagaaattttctaaacagattgcacgcagaattgaagcccatcgagaacaacaacctatagaaacaactttagaactagttgatgtcattaaagaaggcataccagcgaaagcaagacgaaaagggggacatcctgcgaaacgcgtgttccaagctattcgaattgctgtgaatgatgagttatcagcttttgaagattcagttgagcaagccattgaatgtgtgaaggtcggaggtagaatttcagttattactttccactctttggaagatcgtttgtgtaaacaaattttccaagagtttgagaaaggtccagacgtaccaagaggtctacccgttattcctgaagcatatacacctaagttaaaacgagtaaatcgtaaaccgattaccgctactgatgacgatttaaacgaaaacaatcgagcacgtagcgccaagttacgcgtagcagaaatattaaaataa

SEQ ID NO: 8334 - DNA, 402 bp, Staphylococcus epidermidis
atggctgtagaaaaaatttatcaaccttatgatgaagcgacacaaaccagtatcccacaaagacaaccacaatcgagtcctgaaaaacaaaccgttaaaagaaaagttgttgttcaacttactagatttgaaaaaattttatacatagctttaataactgtaattgctctaataagtatttatatgctatctttaaaaatggatgcgtacgatacgcgaggaaaaattgcagatttagatcaaaaaatagagaaacaatctagtgagaacagcgcattaaagtctgaaattaagaaaaattcttcatatgaacgcatttacgacaaggctaagaagcagggcatgagcctagagaacgacaatgtaaaggtagtgcgtaataatggcgaagcgaaaaattaa

SEQ ID NO: 8335 - DNA, 2220 bp, Staphylococcus epidermidis
atgattactggccactctaatggtcaagatttaattatgaaagcaaatgagaaatacttagtcaaaaattctcaacaaccagaacgaggtaagatttatgatcgtaatggtaaagttttagcagaagatgtagaaagatataaacttgttgcagttgtggataaaaaagcaagtaaagaaagtaaaaagccgcgacacgtggttgataaaaaaaagacagcaaaaaaattagctgaaatcatagatatggacgctgacgaaatagaaaaacgacttaataataagaaagcctttcaaatcgaatttggtcagaaaggtactaatttaacttatcaagaaaaagaaaaaatagagaaaatgaaattacctggtatagcactttacccagaaactgagcggttttatcctaatggtaattttgcctcccatttaataggcatggcacagaaagatcctgatactggtgaattaaatggtgcattaggtgttgaaaaaatattcaatagttatttaaatggatcaagaggtgcacttaaatatatacatgatatatggggctacatcgcacctaatacgaagaaagagcagcaacctaaacgtggagacgatgtacacttaacaattgattctaatatacaagtctttgtggaagaagctcttgatgacatggttgaacgctatgctccaaaagatttatttgcagtagtaatggacgcaaaaactggtgaaatacttgcatatagccaacgtccgacttttaaccctgaaacaggtaaagattttggcaaaaagtgggcaaacgatttatatcaaaatacatatgaaccgggctctacttttaaaacatacggcttagctgcagcaattcaagaaggtaaattcaaaccggatgaaaagtataaatcaggtcatagaaatattatgggctctgaaatttccgattggaataaaactggttggggacgtatacctatgtcgttaggttttacttattcatcaaatacgttgatgatgcacttacaagatttggttggtgccgataaaatgaaatcttggtatgaacgctttggatttggcaaaaaaacaggtggtatgtttgatggagaagctgcaggtaatattggttgggcaaatgaattacaacaaaaaacgtcagcatttggtcaatccacaactgttacccctgctcaaatgattcaagcacaatcggctttctttaataaagggaatatgcttaaaccatggtttgtaagtagtattgataatccaataactaaaaagaattattactctggtaaaaaagagtttgccggtaaaccagtaacggaagaaacagccaataaagttgaagaagaacttgataaagtagtaaatagtaagaagagtcatgctatgaattatcgcgtaaaaggttatgatattgaaggtaagacaggaacagcacaagtagctgattcaaatggaggcggttatgttaaaggtgaaaatccttactttgtaagcttcattggggatgcacctaagaaaaaacctaaagtcattgtctatgcaggtatgagtcttgctcaaaaaaatgatcaagaagcatatgaaatgggtgtgagcaaagcatttaaaccaattatggagaatacgctgaaatatttaaatgttggaaaatctagtgatacttcatcaaaaactgactttagtaaagtgcctaacgtgcaaggagatgaagttcaaaaagcagaggatagcgtcaatgctcaatctcttaaacctattacgattggtaatggcaaacaaattaaacaacaatcagttaagtcaggtaccaaagtcctaccacacagtaaagtaatgttaatgacagacggggaattaacaatgccggatatgaccggatggacaaaggaagatgtacttgcttttgaagatttaacgaaaattaaagtttctactaaaggtaatggatttgtcacgaatcaaagtatctcaaaaggtcaaatcattaaaaataaagataagatagaagtgtcattatctgctgaagatacggatgatgaccaagagaaaactgatgaggactcttcggataacaaatcaaagaaagataaagctgatgaggatcattcaaatacatcttcgtcaactaagaatgataagtcaaacgccgactcgaaaaatgattctgatgacagcacaaatgaaacatcaggttctgagagaaataattaa

SEQ ID NO: 8336 - DNA, 966 bp, Staphylococcus epidermidis
atgatctttatatacgcaatcatcgcattactgataacatttattttagtccctatacttattccaacattgaaacgtatgaagtttggacaaagtatccgtgaggaagggcctcaaagccatatgaaaaaaacaggtactcctactatgggtgggcttacatttttaattagtattataattacctctatcattgcaattatctttgtagaccattcaaatccaattattttgttactatttgtaacaatcggttttggtcttattggatttattgatgattatattattgtagttaaaaagaataaccaaggattaactagtaaacaaaagtttctagcacaaataattattgcagttatattctttgtgctaagtgatgtatttcaccttgtgcattttacgacagatttgcatattccatttgtgaattttgatattccgttgtcatttgcttatgtgatatttatcgtcttttggcaagttggtttctcaaatgctgtaaacttaactgatggtttagatggattggcaaccggtttgtcaataataggttttgcaatgtatgctgtaatgagttacatgttagattcaccggctattggcatattttgtattataatgattttcgctttactaggtttcttaccttacaatttaaatccagcgaaagttttcatgggagacacaggaagtcttgctctaggtggtatttttgcaacgatttcaatcatgttgaatcaagaattatcattaatattaattggttttgtgtttgtagttgagacattatctgtaatgttacaagtagcctcatataaattaacgaagaaacgtattttcaagatgagtcctatacatcaccacttcgaattaagtggttggggtgaatggaaggtagtaacagtattttggacggtaggtttaattacaggattaataggtttatggattggagtgcattaa

SEQ ID NO: 8337 - DNA, 1350 bp, Staphylococcus epidermidis
ttgctaaattacactgaattagaaaataaaaatgttttagtagtaggcttagcaaaaagtggatatgaagcggcgaaacttctccttaaattaggggctaacgttaaagtcaatgatggaaaggatctttcacaggatgcacatgctaaagatttagaatctatgggcattgaggtaattagcggtagtcatcctttttctttattagatgatgatcctatcattgtgaaaaacccaggtattccatatactgtatcaattattaaagaagcagcaaatagaggccttaaaatcttaacagaggttgaacttagctatttaatttctgaggcaccaatcatagcagttactggaactaacggtaaaactactgtcacttcactaatcggtgatatgttccaaaaaagcgtgttgactggacgactttctgggaatattggttatgtagcctcaaaagttgcacaagaagttaaatcagatgagtatttaataacagaattatcatcttttcaattattaggcattgaggaatataaaccacatatcgctatcattactaatatttattctgcacatttggattaccatgaaacgttagagaactatcaaaatgctaaaaagcaaatatataaaaatcaaactaaagacgattatctcatttgtaattatcatcaaaggcacctaattgaatcagaaaatctagaagcgaaaacattttatttttcaacacagcaagaagttgatgggatatacattaaagatggtttcattgtttttaacggcattcgcattattaacactaaagacttagtgctaccgggagaacataacctggaaaatattttagcagctgttctagcatcaatcattgctggagtgccagtcaaagctattgtagatagtcttgttactttttccggtattgatcatagacttcagtatattggtacaaatcgcacaaataaatattataatgattcaaaagcaactaatactttagctactcaatttgcgcttaactcttttgatcaaccaattatttggttgtgtggtggattagatcgtggtaatgaattcgatgaacttattccttatatggaaaatgtacgtgtgatggttgtttttggagaaacacaagataaatttgctaaattgggaaatagtcaaggtaagtatgtgattaaagcaacagatgtagaggatgctgttgataaaattcaagatatagtcgagcccaatgatgttgttctattatcaccagcttgtgcaagttgggatcagtatcatacatttgaagaacgtggtgagaagtttatcgatagattccgagcgcacttgccatcatactaa

SEQ ID NO: 8338 - DNA, 1392 bp, Staphylococcus epidermidis
atggaagagaataaaaatcaacctaataaggagaatatgtcgaataaagacgataatgcaactcatttgaatgacagtcacagaaatgaagacttagagctttttagacggaataaaaacgctcgccaacgcagaagacgtcgtatagataaccaaagtaaagaaaaggatgctacgtctacacaatcacagttagaaactaaaccaatggataaatttatagataatcacaagtcgcataatcaaaacaaagaaataaaaagtgacttaattgaagaaaatgttaatgatgaaaacgacaatcaaaaaaatattaatgataaattaaatgaccgtattgtccaagaaacaaatgaaagtcgtcaaagtactgaagacgatgaggaatttccacttgatcatcggagtgaacaacaacctaaagcctctcgtcattctaaaaagcataaattactaagtaaatttacttctaaaaaagaaaaggaaacatctacatcgttcaatagtaatgagaaggtaactcaaattaaaccgcttagtttagaagaaaaaagagccataagacgtaaaaagcaaaaaagaatccaatataccattatcacactactcattcttatcattgttctcattttactctatatggttacaccactgagtaaaatatcaaatgtaaatgttaaaggtaataacaacgtaagtacgagtaaaataaagaaagaacttaacgttacttcgcgatcacgaatgtatacttttagtaaaaataaagcgattaggaacttaaaacagaatcctttaatcaaagaagttgatattcataaacaattaccaaacacgttaactgtcaacgtgactgagtaccaaattgtcggtttagaaaaaaataaagataaatatgtgccaattatagaagatggtaaagaattaacagaatacaaagatgaagtgtcacatgatgggcctatcattgatggtttcaaaggagacaaaaaaacacgaattataaaagctttatcagaaatgtcacctaaagtgagaaacttaattgcagaggtgagttacgcaccaactaaaaataaacaaagtcgcataaagatcttcaccaaagataatatgcaagttattggtgacattacaacgattgcagacaaaatgcaatattatcctcaaatgtcacaatcattaagcagagatgactctggcgaacttaagacaaatggctatattgatttatcggttggagcgtcatttattccttatcaaggttcatcaactgttcaatcgggtacagaacaaaatgtaaccaagtcaacacaagaagaaaatgatgcaaaagaagaacttcaaaatgtgttgaataaaataaataaacaatctaaagaaaataattaa

SEQ ID NO: 8339 - DNA, 1395 bp, Staphylococcus epidermidis
atggaggaacattactatgtgagcatagatataggttcatcaagcgtaaaaacaatagtaggcgaaaaatttcacaacggaattaatgtgataggtacagggcaaacctacacaagtggtatcaagaatggtttaattgatgattttgatattgcaagacaagcaattaaagatacaattaagaaggcttcaattgcctctggtgtagatataaaagatgtatttttaaaactacctatcatcggtaccgaagtatatgatgaatcaaatgaaattgaattttatgaggatactgaaattgatggcacgcatattgaatcagttttagaaggtatccgggataaaaatgatgtgcctgaaactgaagtgataaatgtattcccaattcgttttgtagttgacaaagacaatgaagtttcagatcctaaagaattaattgcaagacattcattaaaagtagatgcaggtgtcatcgcaatccaaaaatctattttaatcaatatgattaaatgtgttgaggcatgtggtgttgacgtgttagatgtttattctgatgcgtacaattatggttctattctcacaccaacggagaaagaattaggcgcttgtgttattgatatcggtgaagacttaacgcaagttgctttctatgaacgaggagaacttgtagatgctgaatctatagaaatggccggtcgagacattacggatgatattgctcaaggactaaatactacatatgacacagctgaaaaggtaaaacatcaatatggtcatgcattttatgactctgcttcagatcaagatgtcttttcagtagatcaagttgattcagatgaacatgttcaatatactcaaaaagatttaagtgactttattgaacaaagagtcgaagatatattcttcgaagtctttgacgttttacaagagctaggacttacaaaagtaaacggaggatttgtagttactggtggatctgcaaatttactaggtgtaaaagaattactacaagatatggttagtgaaaaagtgagaattcatacaccgtcacaaatgggtatcagaaaaccagaattttcttcggctatttctacgatttctagtagtatcgcttttgacgagttattagattatgttacaattagttatcaagataatgaagaatttgaagaagaagttatcgaaactgataaagatactgaaacaaaatcaagcggttttgattggtttaagcgtaaatcaaacaaaaaagaaaatgacgaggtagcaccagaagcgcctcgtgaagagtcttatgaagaccgtgaaaatcatctagaagatgaacaacaaacagaaggcaaagccaaagaagaaagtaagtttaaaaaattaatgaaatctctatttgaatga

SEQ ID NO: 8340 - DNA, 1185 bp, Staphylococcus epidermidis
atgttagaatttgaacaaggatttaatcatttagccacattgaaagttatcggtgtaggtggtggcggaaataacgccgttaaccgtatgattgaccatggtatgaataatgtagaatttattgccatcaacactgatggacaagctttaaacttatcaaaagctgaatcaaaaattcaaattggtgagaaattaacacgtggattaggtgctggtgctaatcctgaaattgggaagaaagcagcagaagaatcaagagaacaaattgaagacgctatccaaggtgctgatatggtattcgtaactgctggtatgggtggcggtactggaacaggtgctgcaccggttgttgctaaaatagcaaaagaaatgggtgctttaactgtaggtgttgttacgcgtccattcggtttcgaaggtcgtaagcgccaaacacaagcggcagctggcgtagaatctatgaaagcagcagtggatacattaattgttattccaaatgatcgcttattagatatcgttgacaaatctacgccaatgatggaagcatttaaagaagcggataatgtattacgtcaaggtgtacaaggtatttcagatttaattgcagtatcaggtgaagtgaacttagactttgcagacgttaaaacaattatgtctaatcaaggttctgcgttaatgggtatcggtgtgtcatctggtgaaaacagagcagtcgaagccgctaaaaaagcaatttcatctccattattagaaacatcaattgtaggtgctcaaggtgtacttatgaacattacaggtggagaatcactgtctttatttgaagctcaagaagcagctgatattgttcaagatgctgcagatgaagatgtgaatatgatttttggtacagttattaatccagagcttcaagatgaaattgtagttactgttatcgcaactggttttgaagataaaccttcttcacaaggtcgtaaagctacaagtactggttttggttcaagtgtaaatagtagttctaatcatcaatctggtgctagtgctaaagaagattcattctctgcacacacttctcattcacaatcaagtgaaagtgtaaatgaaagaagccacactactaaagatgatgatattcctagctttattagaaatagagaagaaagacgttctagaagaactagacgctaa

SEQ ID NO: 8341 - DNA, 792 bp, Staphylococcus epidermidis
ttgaaagagagatttattaagaaaactcattatttagactatcaatttgatgagcctactgatattaagttaggtttcactactcgagaaaatgggttaagtccttatcctaatcatagttttaatatggcaagatatatcagtgacagtgcacatcatattacacatcatcaaaatatcttagcgaatcttattggttatacaagagatgaatgggtttttcctatacaaacacatgataatcgtatcgttgaagttacaagtgaacataaaggaacaaatattgatgaactaactgatgatttacatggcatagatggaatgtatacttttgattctcacattcttcttactatgtgttatgcggattgtgtacctgtatatttttatagtgaaccacatggctatataggattagcacatgcaggttggcgaggaacatatggtcaaatagtaaaagaaatgctaaaaaaagtggattttgattatgaagacttaaagattgtaattggtccagcaacttcaaattcttatgaaatcaatgatgatataaaaaataagtttgaggaattaaccattgattcaactttatatattgagaccagaggtaaaaatcaacatggtattgatttgaaaaaggctaacgcacttcttctagaagaagctggagttccatcaaaaaacatatacgttacggaatatgcaacttcagaaaacttagatttattcttttcatatcgtgttgaaaaagggcagacgggacgtatgttagcatttattggacggaagtaa

SEQ ID NO: 8342 - DNA, 669 bp, Staphylococcus epidermidis
atggatgttaaagaaaatcttgctaagattgaaaaggaaattgatgcaagcattaaaaaaagtgcgcattcagcacaacctcacgtgattgcagtaacaaaatatgttacaatagagcgagctagagaagcgtataaagtaggaataagacatttcggtgaaaatcgattagatggattcaaagagaagaaagaatctctaccaagcgatgttaaattacatttcattggttctttacaatcaaggaaagtaaaagatattataaatgaagtcgattattttcatgctttagatcgtttaagtctagctaaggagattaataaaagagcaaatcatgttataaaatgtttcttacaagtaaatgtttctggagaagaatctaaacatggcatagctcttgaagaagtgaatcaatttataaatcaaattaaagaatatgaaaatatccaaattattggattaatgacgatggcaccattgactgatgatttatcgtacataagaaatttatttaaagaattaagacataaaagaaatgaaattcaacaattcaatttagcacatgcaccttgtacagaattatctatgggaatgagtaatgattatcaaatggcagttgaagaaggtgcaacctttgtcagaattgggactaaacttgtaggagaatag

SEQ ID NO: 8343 - DNA, 594 bp, Staphylococcus epidermidis
ttggctttaaaggatttatttaataatttttttgtagttgaagaagaagaggaagttgaaggacctgaagaacgtgaatcttctagatcacgtgaacgtgttcaagaacgcgaagattacaatcgtaatgagaatcaagcgacaccacaaacttttaacaataagcaacaagcgattaagtctgtacctcaaaagaacactttgagatcgaatacaacttctgaagaaaggaattatcgtatgaataataattcaaaaaataattctagaaacgttgtaacaatgaaccaagcatcacaatcatatgctgctcaggaaagttcaaaaatgtgtctgtttgaaccacgtgtcttttcagatactcaagatattgccgacgaattaaaaaacagacgtgcaactttagtaaatttacaacgcattgatcaagtatcagcaaagcgtattattgattttttaagtggtacggtatacgcaattggtggagatattcaacgcgtgggtactgatattttcttatgcacacctgataatgttgaagtagccggcagtataactgatcacatcgagaatatggagcaacactacgaataa

SEQ ID NO: 8344 - DNA, 291 bp, Staphylococcus epidermidis; identical to SEQ ID NO: 2989

SEQ ID NO: 8345 - DNA, 663 bp, Staphylococcus epidermidis
ttggatccgagaggtcaatatatacttgaagtcattacgcgtagttatcaagatttacatgttacattttttggtggaccacatgcagaaagaaaacgtgcaatcatcgcaccattatattttaagccacagcctgaggactttgaattaactttatttgaacttcaatatcctaagaaatttgtaacaatacaacatcaacacgttcttggaacactcatgtcactgggaatacaaagagatcaactcggcgatattatagttggagaagatatacagtttgttttgacaaaacaattagaatcatatattatatctgaattaacgcgtattaagggagcctcagttaaacttaattctattcctactgaagatatgatacaatcagaagagaattggaaagttcatagtacaactgtgagcgctttgagattagatgtagttttaaaagagatgattcataagtctcgaaatattgcacaacaattaattataaaaaaaagagtcaaagttaaccatacagtaatagattctacagattttcaattagagcagaatgatttattgtcaatccaaggttatggtagagctcaaattgttgaaataggtggaaaaacaaaaaagaacaagttacacattcattatcaaacactatttaaatag

SEQ ID NO: 8346 - DNA, 657 bp, Staphylococcus epidermidis; identical to SEQ ID NO: 2991

SEQ ID NO: 8347 - DNA, 2751 bp, Staphylococcus epidermidis
atgaattacaaagataccctattaatgccgaaaactgattttcctatgagaggtggcttaccgaataaagaaccacaaattcaagaaatgtgggataatgatgagcaatatcgcaaagcgttagaaaaaaataaaaataatccatcattcattttgcatgacggaccaccatatgctaatggtaatttacatatgggacatgcattaaataaaatcataaaggattttattgttcgttataaaacaatgcaaggcttttatgcaccgtatgtgccaggttgggatactcatggtttaccaattgaacaggctttaactaaaaaaggcgttgatcgcaaaaaaatgtcagttgcagaatttagagagaaatgtaaagaatttgcattaaagcaaattgacattcaaaagaaagattttaagcgccttggtgtacgaggtgattttaataatccatacattacattaacacctgaatacgaagccgcacaaataagattatttggagaaatggcagacaaaggtttgatttataaagggaaaaaacctgtgtattggtcaccttcaagtgaatcatcacttgcagaagctgagatagaatatcatgacaaacgttctgcatcaatttacgttgcttttgacgtcaaagacagtaaaggtaaagttgattctgatgcccaatttattatttggacaactacaccatggacaattccatcaaatgtggcaattacagttcatccagagctaaaatatggtcagtataatgttgatggacataaatacatagttgcccaagcattatcagaagaagtcgcagaagcattaggttgggataaagattctatacaattagagaaagaattcacaggtaaagaattggaatttatagaggcacaacatccattcctagatcgtgtatcattagtaattaacggtgaacatgttacgacagacgctggtacgggatgtgtccatacagctcccggtcacggggaagatgactatattgtaggtcaaaaatatgatttaccagtaattagtcctttaaatgataaaggtgtattcactgaagaaggtggaccatttgaaggaatgttctacgacaaagcaaacaaagctgtgactgatcttttaaaagaaaaagacgcactacttaaacttgactttattacacatagttatcctcatgattggcgtacgaaaaaacctgttatctttagagctacaccacaatggtttgcatccattaataaagtaagacaggatattcttgatgcaattgaagacacgaactttaaagtagactggggtaaaacacgaatttacaatatgattcgcgatcgtggcgaatgggtaatttctcgtcaacgtgtatggggcgttcctttaccggtattttatgctgaaaatggcgacatcattatgactaaagagacagtaaatcatgttgcagatttatttgaaaaatacggttcaaatatttggtttgaaaaagaagctaaagaattacttcctgaaggatttagtcatcctggaagccctaacggtgaatttactaaagaaactgatattatggacgtttggtttgattctggttcatcacaccgtggtgtattagaaacgagacctgaactttcattcccagcagacctctattttgagggtagtgatcagtatcgcggttggttcaactcttcaattacaactgctgtagctactcgtggtcaagcgccgtataaattcttgttatcacatggctttgtcatggacggtgaaggtaagaagatgagtaagtcattaggtaatgttatagttcctgatcaagttattaaacaaaaaggcgcagatattgcacgtttatgggtaagtagtactgattacctttctgatgtgcgtatttccgatgaaattcttaaacaaacgtctgatgtatatcgaaaaattcgaaatactttaagatttatgttaggtaatattaacgatttcaaccctgaaacggatagtattgctgaaacaaatttacttgaagtagatcgctatttgttaaatcgtttacgtgaattcacagcgagtacgattaataactatgagaattttgattatttgaatatttatcaagaagttcaaaactttatcaatgttgaactaagtaacttctatttagattacggtaaagatatactttatattgagaaaaaagattctcataaacgtcgtagcatgcaaaccgttttatatcaaatacttattgacatgacaaaattactagcaccaattttagtgcatacagctgaagaagtttggtctcatacgcctcatgtaaaagaagaaagtgtacacctttcagatatgcctaaagttgttgatgtagatgaagaattgttagaaaaatggaatacatttatgaatttacgtgatgatgttaaccgtgcattagaacaagcacgtaatgaaaaagtaattggtaagtcattagaagctaaagtggttattggaaacaatgaaacatttaatacagcggaattcttacaacaatttaatgacttacaacaattattcatcgtttcacaagttgaagttaaagataaagtaaatgatggtgtatcctatcaatatggagatatccatattaaacatgctgaaggtgaaaaatgtgaaagatgttggaactatacagaagaattaggttcagtaggtgaacttgaacatttatgcccacgatgtcaagaagtagtaaaaactttagtataa

SEQ ID NO: 8348 - DNA, 798 bp, Staphylococcus epidermidis; identical to SEQ ID NO: 2993

SEQ ID NO: 8349 - DNA, 471 bp, Staphylococcus epidermidis; identical to SEQ ID NO: 2994

SEQ ID NO: 8350 - DNA, 534 bp, Staphylococcus epidermidis; identical to SEQ ID NO: 2995

SEQ ID NO: 8351 - DNA, 918 bp, Staphylococcus epidermidis; identical to SEQ ID NO: 2996

SEQ ID NO: 8352 - DNA, 528 bp, Staphylococcus epidermidis
atgtctgaacgaattattttagatgaggcagcgatacaacgtacaattacacgaattgctcatgaaattctagaatataacaagggaactaaagatttagttctattaggcattaaaacaagaggtgcttttttagcacatcgtatacaagataaaataaattcaatagaacaacaattagtaccaacaggtactatcgatatcacgcattttcgagatgacgttgataaggtagtgcaacaagctgatcaatacgcttttgatattaatgtagatattaataacaaagtggttgttatcattgacgatgttttgtataccggacgtacagtaagagcctcattagatgcgattttattacatacaagacctattaaaatagggcttgcagcacttgtggatcgtggtcatcgtgaactccctatacgcgcagattttgtaggaaaaaatatacctacagcacgagatgaatctgtttcagtttatttagaagaaattgacgatagaaatgcagtcgtcattgaataa

SEQ ID NO: 8353 - DNA, 1308 bp, Staphylococcus epidermidis
atggaaaatgagcaaatgtttgagcgtaccgttcagccagttcttgatgtaaaagataaaccaaaaccagcacaatgggcatttctgagtcttcaacatttatttgcaatgtttggatcaactgtacttgtaccatttttaacacatctgcctatatcagcagctttgttggcatcaggtattggtacacttttatacatattaatcacaaaagcgaaaattcctgcctacctaggatcgagttttgcctttattacacctatcattacagggttaagtacacatagtcttggagatatgctggttgcattatttatgagtggattaatgtacgtgattataggtattttcattaaattgagtggaacacattggttaatgcacttgttaccaccagtagttgtcggaccagtaataatggtcattgggttaagtttagctcctacagcagtaaacatggccatgttcgaaaattctgctgaaatgaaagggtataacttaagttacttaattgttgctttgattacattagcagtaaccatcatcgtccaaggattcttcaaaggatttttatcactaatacctgtacttataggtattatagtgggatatattgtatccattttcatgggcatagttaaatttgctccaatagcacaagcgaaatggatagattttcctcatatttatctaccatttaaagattacacaccatcttttcatttaggactcattctcgtgatgatacccgtggtgtttgtgacggtaagtgaacatattggtcatcaaatggtaattaataaaatagtaggacgcaatttctttgaaaatccaggtttagataaatcaatcattggtgatggtgtttcaactatgtttgcaagtatgataggaggtcctcctagtacaacttatggtgaaaatataggtgtactagcgatcaccaaaatatatagtatttacgttattggtggtgcggcagttatagctatcattcttgcatttattggtaagttcactgctttaatatcttcaatacctacgccagtgatgggtggtgtctcaattttattattcggtattatagcagctagtggtttaagaatgcttgttgaaagtcaagtagatttcgcaagcaatcgcaacttggttatagcatcagttgtgcttgttgtcgggattggtaatcttcttatcaatttaaaaggcataggtatcaatttacaaattgaaggaatggcattatcagcactttcaggaataatattaaatttaattttgccaaaagataaaaaccaaataaattaa

SEQ ID NO: 8354 - DNA, 882 bp, Staphylococcus epidermidis; identical to SEQ ID NO: 2999

SEQ ID NO: 8355 - DNA, 1278 bp, Staphylococcus epidermidis; identical to SEQ ID NO: 3000

SEQ ID NO: 8356 - DNA, 1101 bp, Staphylococcus epidermidis
atgcttgaaaaacgttatcttgtactggaagatggctcttattacgaaggatatcgcttagggtcagatgacttatctataggcgaaattgtattcaacactgctatgacggggtaccaagaaacaatctctgacccgtcttacacaggtcaaatcataacttttacgtacccactaattggaaactatggtattaatcgcgatgattttgaatcattaacacctaaattaaatggggtagtagtaaaggaagcaagtacacaccctagtaactttagacaccaaaaaactttacacgaaacacttgctcaatatcatattcctggtatatcgggggtagatactagaagtattactcgtaaaattagaaattatggtgttttaagagctggatttacagataataaagataacattcaggaacttgttgaacagttgaaaactgctgaattacctagagatgaagttcaaacggtttctacaaaaacaccatatgtatcaacaggttccgatttaagcgtcgttttactcgactttggtaaaaagcaaaatatcgttcgtgaattaaatttacgtggttgcaacgtcacagttgtaccatatgatacgttagctgaagagattttaggcatgtctccagatggtgtcatgctatcaaacggacctggtgatccagacgaagttgacgttgctttagatatgatcagaggcatattaggaaagataccattctttggtatctgccttggtcatcaactttttgcattatcacaaggcgcaacttcattcaaaatgaaatttggacatcgtggtgcgaaccatcccgttaaagatttaagaacaggtaaaatagatatcacgagccaaaatcacggctattctattgattgtgactcgctaaaaaatactgaccttgaagttacacacattgctttaaacgatggtactgttgaaggactaagacataaagaacttccagcgttttcagtccaatatcatcctgaagcaagaccaggtccaagtgattctaattacttatttgatgagttcatagcaatgatgaaggatttcaaagaaaaggagcgtcaaatcaatgcctaa

SEQ ID NO: 8357 - DNA, 3174 bp, Staphylococcus epidermidis
atgcctaaaagagatgatattaagacaattttagtagtcggttcaggcccaattattattggacaagctgcagaatttgactatgcaggaacacaagcttgtctagcattaaaagaagaaggctacagagttattttagttaattctaatcctgcaacaataatgacagataaagaaattgccgataaagtctacatagaaccattaacgcacgattttattgctcgtattattagaaaagaacaaccagatgcattattacctactttaggtggtcaaactgggttgaacatggcgattcaacttcatgatagtggtgtgttagaagctaataatgtaaagttgttaggcacagagctagagtctattcaacaagccgaagatcgtgaaatgtttagaacattaatgaatgatttaaatgtacctgtaccagaaagcgatattgttaatacagtagaacaagcatttgaatttaaagaacaagttggatacccgttaattgtacgtcctgcatttacgatgggaggtactggcggtggtatttgccataatgatgctgaattaaaagaagttgttagtaatggtttacactatagccctgctacacaatgtttaatagaaaaatcaatcgcaggttataaagaaatcgaatatgaagttatgcgtgataaaaatgataacgcaatcgtagtatgtaatatggagaacatagatcctgtaggcattcatactggagattcaatcgttgttgcaccgagtcaaacactgtcagatgtagaatatcaaatgctacgagacgtatctttaaaagtaattcgtgctttaggtattgaaggtggatgtaatgtgcaactcgcgcttgacccacattcattgaattattacatcattgaggtcaacccacgtgtgtctcgttcatcagcattagcttcaaaagcgacgggttatcctattgcaaaattagctgctaagattgccgtaggtttaacattagatgaaatgcttaaccctatcacaggaacttcatatgctgcatttgaaccaactttagactatgttatttctaaaattccacgtttcccatttgataaattcgaaaaaggtgaacgtgaacttggaactcaaatgaaagcgacaggcgaagtcatggcaatcggtcgtacatatgaagaatctttactgaaagccattcgttcacttgaatatggtgttcatcatttaggtttaccaaatggagaaagttatgaattagattacattaaagagcgtattggacatcaagatgatgaaagattgttctttatcggcgaagcaattcgtagaggaacatctcttgaagaacttcataatatgacaaaaattgactatttcttcctaaataagttccaaaacattattgatattgagcatgaacttaaaaatcatcaaggtgatttagagtatttaaaatacgctaaagattatggttttagtgataaagtgattgctcatagatgggataaggaagaaaaagacatatatcaactacgtatgagtcaaaatattaaaccagtttataaaatggttgatacatgtgcagctgaatttgaatccacaacgccatactattatggtacgtatgaatatgaaaatgaatctatagtaactgataaagagaaaattctagtactaggttcaggaccaattagaattggccaaggggtagaatttgattatgcaactgtacatgcagtatgggctattcaaaatgctgattacgaagctattattgtgaataataatccggagactgtatctactgacttttcaatttctgacaaattatattttgaaccactaacagaagaagatgttatgaatatcattaacttagaacaacctaaaggtgttgtagtacaatttggtggtcaaacagcaataaacttagctgataagttagcacaacatggtgttaaaattctcggaacatcattagaagatttaaatcgagctgaggatagaaaggaatttgaagcgttattacgtgaaatagctgtacctcagccacaaggtaaaactgctacatcacctaaagaagctcttgaaaatgcaagagaaataggctatccagttgtagttcgtccttcatacgtgcttggtggccgtgcaatggagattgtagataatgatcaagaacttgaaaattatatgactcaagctgttaaagcaagtccagaacatcctgtattggtagaccgctatttaacaggaaaagagatagaagtggatgctatttcagatggtgagactgtcgtgattccaggaattatggaacatatagagcgtgcaggtgttcacagtggagattctattgcagtttatccaccacaaacactgactcaagacgaaattaatacactcgaagactacacaattaaattggcaaaaggtttaaatattaaaggtcttattaacattcaatttgtcatagctcacgacggtgtttatgtgttagaagttaatccgcgttcaagccgtacggtaccattcttaagtaagattactgatattcaaatggcacaattagcgatgcgtgcaattatgggtgaaacgcttgccgaaattgggttcaaacaaggtatccaaccatactctgaaggcgtatatgttaaagcgcccgtatttagttttaataaattaaaaaatgtagatataacgcttggaccagagatgaagtctacaggtgaagttatgggtaaagacctaacacttgaaaaagcgctatacaaaggtctcactggtagcggatttgaagtgaaagatcatggtacagtattgatgactgtaagtgataaagataaagatgaaatagtcaagattgcacatcgattaaatgaaataggctacaaaatattggctactcgtggaacagcacaaaagttaaaagatcataatattccagttgaggtcgtaggaaaaatcggtggcgaggatgatttactgacacgaattcaaaatggagaagtgcaaattgtcattaatactatgacaaaaggaaaagaaatcgaacgagatggattccaaattcgacgtacaacagttgaaaatggtgtaccttgtttaacatcactggatactgccagtgctttaacaaatgtcattgaaagcatgacgtttactatgagaaatgtataa

SEQ ID NO: 8358 - DNA, 693 bp, Staphylococcus epidermidis; identical to SEQ ID NO: 5465

SEQ ID NO: 8359 - DNA, 612 bp, Staphylococcus epidermidis; identical to SEQ ID NO: 3004

SEQ ID NO: 8360 - DNA, 207 bp, Staphylococcus epidermidis; identical to SEQ ID NO: 3005

SEQ ID NO: 8361 - DNA, 123 bp, Staphylococcus epidermidis; identical to SEQ ID NO: 3006

SEQ ID NO: 8362 - DNA, 408 bp, Staphylococcus epidermidis; identical to SEQ ID NO: 3007

SEQ ID NO: 8363 - DNA, 1698 bp, Staphylococcus epidermidis; identical to SEQ ID NO: 3008

SEQ ID NO: 8364 - DNA, 624 bp, Staphylococcus epidermidis; identical to SEQ ID NO: 3009

SEQ ID NO: 8365 - DNA, 213 bp, Staphylococcus epidermidis; identical to SEQ ID NO: 3010

SEQ ID NO: 8366 - DNA, 1200 bp, Staphylococcus epidermidis; identical to SEQ ID NO: 3011

SEQ ID NO: 8367 - DNA, 2409 bp, Staphylococcus epidermidis
atgattgcaaaagtaattgttgatattccgtcgaaaagtgtcgattttaaatttgattatatcgttcctaaaaatttagaacgtgtgattcaaattggcgttcgcgttgtggtaccttttggccctagaactatacaaggatacgttatgaatattcaacaagaaccagatggaaatatggatatatcgaaactaaaagaaataaaagaagtgcgtgatattaaacctgaattaacatccgaactgattcaattaagcgaatggatgagccattatcatgtgatgaaacgtatttctgttttagaagcgatgttgccaagtgccattaaagcaaagtataagaaagctttttcaattatcgatccaaaaaatttatcttcaaaaaccaaagcgctatttaacaatgacggttattacttatataaagaagctcagcaaaacaatgatttagaagaaatgttgactttgttaaatcaaggattgattgaagaggtcacgatactttctcaaaacacaaaaaagaaaactcaaaaagctgttggcgtagttaatacgttgaatggtgatgaagtacttgcaaaactcgagaaatatacaaaacaatatgatttgtatgcatttttattagaagagtctcatcgaacagtgtttttaaaagaaatcaatgatatgggcttctctcactcgagtttagattctttaatcaaaaaaggttatattgaaaaatataccgccgaggttttcagagatccttatgcaaatcgtatatttgaacaagaacaaaagaggatattaactaaagaacagcaagatgcatttgaagctattcaacattatattcatgatgaaaaagaaagaacatttttattacacggagtcacaggttcaggtaaaaccgaagtctatcttcaaacaatagaagaagttcttaataaaggtaaagaagccatgatgttagtgccggaaatcgccttaacacctcagatggtgctaagatttaaacgtcgatttggagatgatgtagcggtattacattccggactttcaaaaggtgaacgttatgatgagtggcaaaaaattagagacggtcgagctcgagtgagtgtaggtgctcgttcaagtattttcgcaccgtttaaaaatttaggcatcattataattgatgaagaacatgaatctacatataaacaagaagattatcccagatatcatgcacgtgatattgcacaatggagaagtcaatttcatcattgtcctgtagttttaggtagcgcaacaccgagtcttgagtcatatgctagagcagaaaaaaatgtttacgagttgttgtcattgccacatagagtcaatcaacaagcgttaccgcatattgatattatagatatgagagaagaattaagtgaaggtaatcgttccatgttttctatagcactaagacaagcgatacaagaacggttggataaaaaagaacaaatagtactattcttaaatagaaggggatatgcttcatttatgttatgtagagattgtggttacgttccccaatgtccccattgtgatatttcgttaacatatcataaaacaaccgatcaattaaaatgtcattactgtggttatcaagaaaatccaccatctcaatgtccaaattgtgaaggtgatcatatcagacaagtcggaactggaacgcaacgtgtagaagaattattacaacaagaattccctcatgctcgtattataaggatggatgttgatacaacttcaagaaaaggtgcacatgagaaattgttaaatgactttgaagcaggaaaaggagatatcttattaggtacgcaaatgattgctaaaggtttggattatcctaacattactctagttggtgtgctcaatgctgacactatgttaaacttacctgactttcgtgccagtgaacgaacataccaacttttaactcaggtatctggacgcgcaggtcgtcatgaaaaagaaggacaagttatcatacaaacgtacaatcctgatcattattcaataaaggatgtgaaattaaacgattatctttctttttatcaaaaagaaatgaattatcgaaaattaggaaaatatccaccttactattttttgattaactttaccatttcacatactgatataaaaaaggtcatgatggcttctaagcatatacatcaaattttagtacagcacttaagtgaaaaagcattcgtgttaggcccttcaccagcagcactagcaagaattaacaatgagtatcgttttcaaatactagtaaaatataagagtgagcctcaattacatcaagcgttacaatatttagatgattattatcatgatcaatatgtaaaggataaactatcattaaaaattgatatcaatccacaaatgatgatgtga

SEQ ID NO: 8368 - DNA, 204 bp, Staphylococcus epidermidis
atggaagttaataaagtcatttatattttactagcagtctttcttggtagttttggcatccacaaattttatgctggtaaaccaattcaaggattattgcatattctattttgttggactgctatcccgcatgtgttagcaattattagtgcagttttaacattattcaaacctgccgacgcaaacgggaacgtcagaatgtaa

SEQ ID NO: 8369 - DNA, 489 bp, Staphylococcus epidermidis; identical to SEQ ID NO: 3014

SEQ ID NO: 8370 - DNA, 939 bp, Staphylococcus epidermidis
ttgacaatgagtaaaatcatttttatgggaacacctgatttttcaacgaaaattttagagatgttaattgctgagcatgaagttatcgctgtagtgacacaacctgatagaccagtgggacgtaagaaagtgatgacaccaccaccagtaaaaagagtagctacaaagcatcaaataccggtatatcaacctgaaaaacttaaagattctcaagaattagaatcgttactttctttagaatcagatttaatagtaacggctgcgttcggtcaactattaccagagtccttactcaatgcacctaaattaggagctattaatgtccatgcatcattgctacctaagtatagaggaggagcacctatacatcaggctataattgatggtgaagaagaaactggaatcacgattatgtatatggttaaaaaacttgatgcaggtaatatcatctcgcaacaatcaattcgtattgaagaagaagataatgttggcacaatgcatgataaattaagctttttaggtgccgaattattaaagaagacacttcctagtatcattgataataccaatgacagtatccctcaagatgatgcacttgcaacatttgcatctaatattcgtcgtgaagacgagagagttgattggaatatgagtgcacaagcaattcataaccatattagaggactgtctccatggccagttgcttatacaactatgaatgaaaagaatctcaaattatttagcgctttcattgtgaaagggaaaaaaggtaatccaggaacaattattgaaactactaagcatgaactcatcatagctaccggttctgatgatgccatcgcacttactgagattcaacctgcaggaaaaaaacgcatgaaagttactgattatttaagtggtgtacaagagtcgttagttgggaaagttctattatga

SEQ ID NO: 8371 - DNA, 1308 bp, Staphylococcus epidermidis; identical to SEQ ID NO: 3016

SEQ ID NO: 8372 - DNA, 1095 bp, Staphylococcus epidermidis; identical to SEQ ID NO: 3017

SEQ ID NO: 8373 - DNA, 744 bp, Staphylococcus epidermidis; identical to SEQ ID NO: 3018

SEQ ID NO: 8374 - DNA, 2004 bp, Staphylococcus epidermidis
atgataggtaaagtcataaatgaacgctatactattaccgataaactcggtggtggtgggatgagtattgtttacttagctgtagattcaatacttaacagaaaagttgctattaaagcgatttcgattcctccaagtgaaaaagaagagacatttaaacgttttgaaagagaagtacataattcttctcaactttctcacgagaatatagtcagtatgattgacgtagatgaggaagatgattgtttttatattgtcatggaatacatagaaggtcctactttagcggaatatatacacagtcatggtccacttagtgtagaaactgctattcagtttacagaacaaattttgagtggaatcaaacatgcgcatgacatgagaattgttcatcgcgatattaaaccacagaatatattaattgataagaataaaaaattacaaatttttgattttggtattgctaaagcattgagtgaaacatcgctgactcaaacaaatcatgttctgggaaccgttcaatatttatcacctgaacaggctaaaggcgaagctactgatgaaagtactgacatatattcaattggtattgtattatatgagatgttagttggagagccaccattcaatggagagactgcagtgagtattgctataaagcatattcaagatagcatcccaaatattacaactgataaaagagatgatgtacctcaatcattgagtaatgtcgttttacgtgctacagagaaagataaatatcatcgctatcatactgttcaagaaatgtgtgacgatttaacaagtgctttacatgagaatcgtttgaatgaagaaaaatacgaactagataaaactaaaacggtaccactcactaaagatgatttgaatcataaaatctatgatgaacaaaatcaaaatgaccttaataaaaccatgcaaatacctattgttaacgattcaataaaacaacaagaatttcaatcgtctgaaccacgttattatcaaaaaagcgacaagaaacgttctaaaatgaaaattgcaattttatcaatcatttttgtaatattattaattggtttattttcttttgtagctatggctgtttttggaaataaatatgaagaaatgcctgaccttaaagggaaaactgaaaaacaagctgaaaaggtattagatagtcatcatctaaaagtaggtgacatatcaagaaattatagtgataaatatcctgaaaaccaaattattaaaacaaatccagatagtggagaacgcgtcgaacaaggggatagagttgatatcgttctatccaaaggaccggagaaggttaagatgccaaatgttttaggtatgtcgaaaaatgatgcgctaaaaaaattaaaggctatcggatttaaagatattcacgttgagcaagcttatagtcaaacatatgaaaaaggattaatttctgaacaaagcgttgtagctaatagtgaggttgccgttaataatcatcatattacaatttatgaatcattaggtgttcgacaagtatatgtcaacaattatgaaaataagtcatatgagtcagcaaaaaaagaacttgaagataaaggatttaaagttcaagtgacaaaagaaaacaacgatgatgtcgaaaaaggtaatgtcatttctcaatctccaaaggataaaactgttgatgaaggttctactatattattagtggtttctaaaggagaaaagtctgacgaagaagatgatgaggaggacaaggatacaacgacaaaaaatgagactgttaaagtaccgtataccggtaaaaaaagtaaaagtcaaaaagtagaagtatttattcgtgatattgaaaataaaggtgattcagcagttcaaacgtttaatattaaaagtgataaaacaattaatattcctttgaaaattaaaaaaggaagtgatgctgggtacaccataagagttgataataaaattgtagctgataaagatgtgagctatgatggctaa

SEQ ID NO: 8375 - DNA, 876 bp, Staphylococcus epidermidis; identical to SEQ ID NO: 3020

SEQ ID NO: 8376 - DNA, 645 bp, Staphylococcus epidermidis; identical to SEQ ID NO: 3021

SEQ ID NO: 8377 - DNA, 636 bp, Staphylococcus epidermidis; identical to SEQ ID NO: 3022

SEQ ID NO: 8378 - DNA, 189 bp, Staphylococcus epidermidis; identical to SEQ ID NO: 3023

SEQ ID NO: 8379 - DNA, 375 bp, Staphylococcus epidermidis; identical to SEQ ID NO: 3024

SEQ ID NO: 8380 - DNA, 1659 bp, Staphylococcus epidermidis
atgattagcaaaataaatggtaaattatttgccgatatgattatacaaggggcacaaaatttatcaaataatgcagacttagtggattcattaaacgtctatcctgttccagatggagatacagggacaaatatgaatttaactattacttctggtcgtgaggaagtcgaaaataatttatctcaaaatattggagagttaggtaaaacattttcaaaaggattacttatgggggctcgtggtaattccggtgttattctttctcaattattcagaggtttttgtaagaatattgaagaagaaaaagaaataagcgtgcaacagtttgctgagagttttcaagctggagttgaaacagcttataaggcagttatgaaaccggtagagggaacgattttaacagtagccaaagatgcagcaaaagccgcaatggattacgtggatcaagctgaagattgcgttgatttaatggcacatgtgattgaagctgcaagcgaatctctagataatacgcctaatttattagcagtacttaaagaagtaggcgttgttgatagtggtggtaaaggtttattatgcgtttatgaaggattcttaaagggtcttaaaggcgaaaaaatagaagcacaagcacctaaacttgatactgaatcatttgttaatgacgatcatgattttcatggggttattaatacagaggatattgtttacggttattgtacggaaatgatggttcgatttggtaaaaataaaaaagcatttgacgagcaagaatttcgtaatgatatgagtgaattcggagattcgttattagtaattaatgatgatgaaattgttaaagtgcacgtacatacagaacatccgggtgatgtatttaattatggtcaaaaatatggtgaactaattaaacttaaagtagaaaacatgcgtgaacaacatcgtgaagttattcgtaaggaacaagatggacttcaaaataaagaagctaatgaatcccaaacagttgaaacagctattgttacaatttctgtaggcgatgggattgctgaattatttaaatctatgggagcaacgcacattattagtggagggcaaacaatgaacccttctactgaagatatagttaaagttattgaacaatcacaatgtaaacgtgcaattatcttaccaaacaataaaaatattatgatggccagtgaacaagcagctagtattgtagaagctgaaactgtagtgattcctactaaatctattccacagggaatatcagccttattccaatatgatttagaatctagtttagaagataataaacgccatatgagtgatgctttggaaactgttcaatctggttcaattacttttgcagttagagatactaaaatagacggtattgaaatcaagaaagatgaattcatgggtctagctgaagacaaaattgtgacaagtgatgttaatcaatttcatgcagtaaaaggtctactcagcaaacttcttaatgaagatagcgaaattttaacaatgatttcaggcgaagatgctgataattcaattacaaaccaaatcattgattggattgaatcggagtaccctgatgttgaagtggaacaacatgaaggtggacaacctatttatcaatatttcttcgcagtagaataa

SEQ ID NO: 8381 - DNA, 2049 bp, Staphylococcus epidermidis
atgtcaaaagttcatcttattgagagcccatatgcattagataaaatcaaaggtataggtccgaaacgtttagcgttgttagaagaattaaatattaaatcagttgaagatttagtattatatttaccaacacgttatgaagataatactgttattgacttaaatcaagcagacgatcaagcaactgtaacagtgcaaggtgaggtttattccagtccaactgttgctttttttggtcgtaataaatcgaaactaactgtccatcttatgataaatcatatcgctgttaaatgcgtattttttaatcaaccttatttaaaaaagaaacttgaactaaatagtattgtcactataaaagggaaatggaatcgtaataaacaagagattaatggtaatcgtatattttttaaagatcaaaaaaatcaagaggatactcatttagaaccaatatataggattaaagaaggaataaagcaaaagcagttacgcgataatataagacaggcgcttagtgatgttacaattcatgaatggttaactgatgacctcagagaaaagtataaattagaaactttagcttatacaatacaaacactacatcatcctattaataaacaaaatttgctaagagctagacggacttatgcatttacagagctatttatgtttgagctacgtatgcaatggttaaatcgcttagaaaagacatcagatgaggctattgaaattaattacgatataaataaagtaaaacaatttattgatagtttgccatttgagttaactgacgctcaaaaagttagtgtcaatgaaatatttcgtgatttaaaggcgcctattcgtatgcatcggttgttacaaggtgatgttggatctggcaaaactgtggtagcagcaatttgtatgtacgccttaaaaactgcaggctatcaatctgcattaatggttcccacggagattttagctgaacagcacgctgaaagtttaatacaactatttggtaatacaatgaacgtagctttattaactggttctgttaaagggaaaaaaagacgacttcttttagagcaattagaaaatggaactatcgattgtttgattggtacacacgccttgattcaagatgatgtagtcttcaataatgttggattagtcattacagatgaacagcaccgatttggtgttaaccaacgacaaattctaagagaaaaaggtgcaatgacaaatgtattgtttatgacagcgacaccaatccctagaacactcgctatttctgttttcggtgaaatggatgtatcttcaattaaacaattaccaaaagggagaaaacctataaaaacaagttgggccaaacatgaacaatatgatcaagtacttgcacaaatgtcgaatgaattaaaaaaaggtagacaagcctatgtcatctgtccattaattgagagctctgagcatttagaagatgtacaaaatgttgtggcactttatgaatccttacaaagtgattatggtaatgaaaaagttggattattacatgggaaaatgtctgcagaagataaagatcaagtcatgcaaaaattcagtgatcatgaaatagatattttagtttctactactgtagttgaggtaggtgtaaatgtacctaatgcaacgtttatgatgatttatgatgcagatcgatttggtttatctacattacatcaattacgtgggcgtgttggtcgtagtgaacatcaaagttattgtgtattaattgcatctcccaagactgaaacaggtattgaacgtatgaccattatgactcaaactactgatggattcgaattaagtgaaagagatttagaaatgagaggtccaggggatttctttggagtaaaacaaagcggtcttccagactttcttgtagcaaatgtagtagaagattatcgtatgcttgaagttgctagagatgaagcagcagaacttatacaatctggccaatttttcgaacaacaatatagtcatttaagagagtttattaaacaaaacttacgccatattcgtttcgattag

SEQ ID NO: 8382 - DNA, 561 bp, Staphylococcus epidermidis
gtgaaattaaagaaaaacgatagacgagtagccattaaagaggctatcgaattaaaccccttcatcactgattatgaattgtgtgagaagtttgatgtaagtattcaaactatacgtttagatcgcacgcatttaaatattcctgagttacgtaaaagaattaaattggtagctgaacaaaattatggacgaattaaatcaatagaagccaatgaaattataggtgatttgattcaagtgaatcctgatgttagcgcacaatctttaattgaaattacaattgattctgtttttgcaaaaagtgagattgctagagggcacgtcttatttgcacaagctaactcattatgtgtagctcttatacataaaccaatagtattgacacatgaaagtcaagttgaatttaaagaaaaagtaaaattaaatgatacagttcgagcagatgcccgtgtcatagatataacagataagcattatattattgaagtgaattcttatgtttcagatatgttagtttttaaaggtaaattcaaaatgtactatacaagtgaggatgaatga

SEQ ID NO: 8383 - DNA, 978 bp, Staphylococcus epidermidis; identical to SEQ ID NO: 3028

SEQ ID NO: 8384 - DNA, 927 bp, Staphylococcus epidermidis; identical to SEQ ID NO: 3029

SEQ ID NO: 8385 - DNA, 735 bp, Staphylococcus epidermidis
atgaataaaagtgctttagttacaggtgcttctcgtggtattggtagaagcattgcattgcaattagcggaagaaggatataatgtagctgtcaattatgctggaagtaaagataaagcagaagcagttgttgaagaaattaaagctaaaggtgtagaaagctttgcaatacaagccaatgttgcaaaaggcgatgaagttaaagaaatgattaaagaagtggtaagtcagtttggttctgtagatgtattggttaacaatgcagggataactaaagacaacttacttatgcgtatgaaagaacaagaatgggatgacgtgattgatacgaacttaaaaggtgcgtttaactgtattcaaaaagtaacgccacaaatgttgcgtcaacgtagtggtgcaatcattaatctaactagtattgttggtgcaatgggtaatcctggacaagcaaactatgttgcaacaaaagcaggtgtcattggattaacaaaaactgcagcacgagaactagcatcacgaggtattacagtgaacgctgtagcacctggtttcatcgtttcagacatgacaaatgctttaagtgatgatttgaaggatcaaatgttagagcaaattcctttaaaacgttttggagaagatacagatatagctaatactgttgccttcctagcttctgataaagctaaatatattacaggccaaacaattcatgttaacggtggaatgtatatgtaa

SEQ ID NO: 8386 - DNA, 234 bp, Staphylococcus epidermidis; identical to SEQ ID NO: 3031

SEQ ID NO: 8387 - DNA, 738 bp, Staphylococcus epidermidis; identical to SEQ ID NO: 3032

SEQ ID NO: 8388 - DNA, 3570 bp, Staphylococcus epidermidis; identical to SEQ ID NO: 3033

SEQ ID NO: 8389 - DNA, 1227 bp, Staphylococcus epidermidis
atgagtttttttaaacgtctgaaagataaattttctagtaaaagtgaagatgatattcaaaaagacctagatgaaactgtagattcaaatgctaatagtgactcagattcaatggacccgaatgattctgatgaacaagtcaaacccaaaaagaaacctaaaaaattaagtgaagctgattttgacgaagatggtttgatatcgattgaagattttgaagaaattgaagctcaaaaaattggagcaaaattcaaagccggtttggaaaaatcacgtcaaaacttccaagaacagttaaataatttaattgctcgatatagaaaagttgacgaagatttcttcgaagctctggaagaaatgcttattactgcggacgttggttttaataccgttatgaaattaactgatgagctacgtacagaagcacaaagacgtaatatacaagaaacagaagacttaagagaagttatagttgagaagattgtagaaatctatcatctagaggacgatcattctgaagcaatgaatattgaagatggacgtttaaatgtcatactgatggttggtgtgaatggtgtcggcaaaacaacaacaattggtaaattagcttatcgttatcaacaagaaggtaaaaaagtaatgttagccgctggtgataccttcagagctggagcaattcaacaattaaacgtctggggagaacgtgttggtgttgaagttgtgagtcaaaacgaaggttctgaccctgcagcagtagtatatgatgcgattaatgccgcaaaaaataaaggcgtagatattttaatttgtgatactgctggacgcttgcaaaataaatctaatttaatgcaagagttagataaaatgaaacgtgtgattaatcgtgcaatacctgatgccccccatgaagctttattatgcttggatgcaacaactggtcaaaatgcactttcacaagcacgttcatttaaggaagttacaaatgtctcaggtatagttttaactaaattagacggtactgctaaagggggtattgtattagcaattcgaaatgagttacacattccagttaaatatgttggtttaggcgaaaaaatggatgacttacaaccgtttaatcctgaaagctatgtatatggattatttgctgatatgatagaacaaaatgaagatattcctgaagaaatctctagaaattcatccgttgaatctgaagaaggtaactaa

SEQ ID NO: 8390 - DNA, 333 bp, Staphylococcus epidermidis; identical to SEQ ID NO: 3035

SEQ ID NO: 8391 - DNA, 1368 bp, Staphylococcus epidermidis; identical to SEQ ID NO: 3036

SEQ ID NO: 8392 - DNA, 276 bp, Staphylococcus epidermidis; identical to SEQ ID NO: 3037

SEQ ID NO: 8393 - DNA, 504 bp, Staphylococcus epidermidis; identical to SEQ ID NO: 3038

SEQ ID NO: 8394 - DNA, 738 bp, Staphylococcus epidermidis; identical to SEQ ID NO: 3039

SEQ ID NO: 8395 - DNA, 351 bp, Staphylococcus epidermidis; identical to SEQ ID NO: 3040

SEQ ID NO: 8396 - DNA, 144 bp, Staphylococcus epidermidis; identical to SEQ ID NO: 5427

SEQ ID NO: 8397 - DNA, 2604 bp, Staphylococcus epidermidis; identical to SEQ ID NO: 3041

SEQ ID NO: 8398 - DNA, 2601 bp, Staphylococcus epidermidis; identical to SEQ ID NO: 3042

SEQ ID NO: 8399 - DNA, 114 bp, Staphylococcus epidermidis; identical to SEQ ID NO: 3043

SEQ ID NO: 8400 - DNA, 864 bp, Staphylococcus epidermidis; identical to SEQ ID NO: 3044

SEQ ID NO: 8401 - DNA, 771 bp, Staphylococcus epidermidis; identical to SEQ ID NO: 3045

SEQ ID NO: 8402 - DNA, 1167 bp, Staphylococcus epidermidis; identical to SEQ ID NO: 3046

SEQ ID NO: 8403 - DNA, 909 bp, Staphylococcus epidermidis; identical to SEQ ID NO: 3047

SEQ ID NO: 8404 - DNA, 873 bp, Staphylococcus epidermidis; identical to SEQ ID NO: 3048

SEQ ID NO: 8405 - DNA, 2070 bp, Staphylococcus epidermidis; identical to SEQ ID NO: 3049

SEQ ID NO: 8406 - DNA, 1308 bp, Staphylococcus epidermidis; identical to SEQ ID NO: 3050

SEQ ID NO: 8407 - DNA, 891 bp, Staphylococcus epidermidis; identical to SEQ ID NO: 3051

SEQ ID NO: 8408 - DNA, 543 bp, Staphylococcus epidermidis; identical to SEQ ID NO: 3052

SEQ ID NO: 8409 - DNA, 1404 bp, Staphylococcus epidermidis; identical to SEQ ID NO: 3053

SEQ ID NO: 8410 - DNA, 771 bp, Staphylococcus epidermidis; identical to SEQ ID NO: 3054

SEQ ID NO: 8411 - DNA, 789 bp, Staphylococcus epidermidis; identical to SEQ ID NO: 3055

SEQ ID NO: 8412 - DNA, 879 bp, Staphylococcus epidermidis; identical to SEQ ID NO: 3056

SEQ ID NO: 8413 - DNA, 723 bp, Staphylococcus epidermidis; identical to SEQ ID NO: 5410

SEQ ID NO: 8414 - DNA, 555 bp, Staphylococcus epidermidis; identical to SEQ ID NO: 3058

SEQ ID NO: 8415 - DNA, 771 bp, Staphylococcus epidermidis; identical to SEQ ID NO: 3059

SEQ ID NO: 8416 - DNA, 783 bp, Staphylococcus epidermidis; identical to SEQ ID NO: 3060

SEQ ID NO: 8417 - DNA, 1287 bp, Staphylococcus epidermidis
atgagcattttaattacgattatttcatttatcatcgtatttggtgtactcgtaactgttcacgaatatggacacatgttttttgctaagcgagcaggaattatgtgtcctgaatttgcgattggtatgggtcctaaaatttttagttttcgtaaagatgaaacattatatacaattcgtctattaccggtgggtggttatgtcaggatggctggtgatggtcttgaagaaccaccagttcaaccaggtatgaacgtaaaaataaagttaaataaccaagacgaaatcacacatataattctagatgaccaacataaattccaacaaattgaagccatagaagttaagaaatgtgattttaaagatgacctatatattgaaggtatcacttcttatgatgatgaaaggcatcacttcactatagcgaaaaaggcattttttgtcgaaaatggaagccttgttcaaattgctccaagagatagacagtttacacataagaaaccattgccaaagtttttaacattatttgcaggtccgttatttaattttattttagctttagttctatttattggattagcatactaccaaggtacgccaaccaatgtcataggagaagttgtgaagaaatctccagctgatgaagctggattgcacaaaggtgataaaatagttcaggtaggtaatcataaaattaaaaattttgatgatatcaaacatgttcttgaccaaaataaaacggcgaaaacaactgtaaaaattaaaagggatggccaaaacaagtctgtagatctccaacctaaaaaagtagagagaaagataactaaaactaaaaatcaaacaacttatcaaattggttttgcccctactacagaacacagcgtttttaaaccaataagctacggtatttataactttttcgataaaggtaagcttatttttacagctgttgttggtatgttagctagtatatttacaggagaattttcatttgatatgttaaatggccctgttggtatttatcacagtgttgattctgttgttaaatctggaattattaatttagtaggatacaccgctttattaagtgttaacttaggaataatgaatttgctacctattccagcgcttgatggtggtcgcatattatttgtactatatgaggctatttttagaaaaccagtgaataaaaaagcggaaacaggaattattgctgtaggcgcactttttgtggttattattatgattttagtcacttggaatgatatacaacggtatttcttataa

SEQ ID NO: 8418 - DNA, 1704 bp, Staphylococcus epidermidis; identical to SEQ ID NO: 3062

SEQ ID NO: 8419 - DNA, 4317 bp, Staphylococcus epidermidis; identical to SEQ ID NO: 3063

SEQ ID NO: 8420 - DNA, 468 bp, Staphylococcus epidermidis; identical to SEQ ID NO: 3064

SEQ ID NO: 8421 - DNA, 1224 bp, Staphylococcus epidermidis; identical to SEQ ID NO: 5402

SEQ ID NO: 8422 - DNA, 285 bp, Staphylococcus epidermidis; identical to SEQ ID NO: 5401

SEQ ID NO: 8423 - DNA, 318 bp, Staphylococcus epidermidis; identical to SEQ ID NO: 3067

SEQ ID NO: 8424 - DNA, 2163 bp, Staphylococcus epidermidis; identical to SEQ ID NO: 5399

SEQ ID NO: 8425 - DNA, 351 bp, Staphylococcus epidermidis
atgaataatataagagcagaacgtgtaggagaacaaatgaaacaggaaatcatggacattgttaataataaagttaaagaccctagagttggttttttaacaattactgatgttgaactaaccaatgacctttcacaagcaaaggtatatttaacagtgttagggaatgataaagaagttgataatacgtttaaagctttgcataaagcaactgggtttataaaatctgaacttggttctcgaatgcgcctaagaattatacctgagttaacattcgaatatgatgaatctctcgaatacggtaataagatagaacgcatgattcaagagttacacaaaaatgataaataa

SEQ ID NO: 8426 - DNA, 918 bp, Staphylococcus epidermidis
atgtataatggcatactaccggtatttaagaaacgaggtttaacaagtcacgacgtcgtttttaaattacgtaaaattttaaaaatgaaaaaaattggtcatacaggaacattagatcctgaagttaatggtgtgttaccaatttgtttaggcgatgcgacaaaagtcagtgattatatcatggaaatgggaaaaacttatcacgctatgataacgctaggaaagagtacgactactgaagaccaaactggagatattttagaaactagggctgttgataagaatgatattaatgaagatacgattgaccaagtgttgcagcaatttgaggggcatattcaacaaattccgcctatgtattcttctgttaaagtaaatggaagaaaattatatgaatatgcgagaaataatgaaactgtcgaacgccctaaacgacaagtttttattaaagatatacatagaatatctgaagttacttttcaggagcagacatgtcattttgaagttgaagtaacatgtggtaaaggaacttatattagaactttagctacagatattggacttaaacttggttttccagctcatatgtcacgtctaactagaattgcttctggcggttttcaattagaaagtagtttaacgattgatcaaattaaagaattacatgagcatgattcattacataatgaattgtttcctatagaatatggcttaaaaggtctgaaatcattccaagtgaaagattcaaattttaaaaagaaaatctgtaacggtcaaaaatttcataaaaaagtgttaagtcaaaatgttaaagaaccttttatatttgtcgatagtagcactcaaaaagttttagcaatatatatagttcatccagataaaccttatgaaataaaacctaaaaaagtttttaattaa

SEQ ID NO: 8427 - DNA, 972 bp, Staphylococcus epidermidis; identical to SEQ ID NO: 3071

SEQ ID NO: 8428 - DNA, 270 bp, Staphylococcus epidermidis; identical to SEQ ID NO: 3072

SEQ ID NO: 8429 - DNA, 2106 bp, Staphylococcus epidermidis; identical to SEQ ID NO: 3073

SEQ ID NO: 8430 - DNA, 1674 bp, Staphylococcus epidermidis
ttgagtttaataaagaaaaaaaataaagatattcgtattattccactcggtggagtaggcgaaatcgctaaaaatatgtacatcgttgaagtagacgacgaaatgtttatgttggatgcaggattaatgttcccagaagatgaaatgcttggggtagatatcgttattcctgacattcaatatgtcattgaaaacaaagaaagattaaaaggaatatttcttacacacggtcatgaacatgctataggcgcagtaagttatgtgttagaacaaatcgatgcaccagtttatggttctaaattgacaatcgcacttgttaaagaagcaatgaaggcccgaaatattaaaaagaaagtacgttactatactgtaaaccatgattcaattatgagatttaaaaatgttaacgtgagtttctttaatacgacacatagcattcctgatagcttaggcgtatgtattcatacttcgtatggttctatagtttatactggagagtttaagtttgatcaaagtttgcatggacattatgctccagacttgaaacgaatggcagaaattggtgatgagggtgtgttcgcattaatcagtgattcaacagaagctgaaaagcctggatataacacgcctgaaaatattattgaacatcacatgtatgatgcttttgccaaggttaaaggtagacttattgtatcatgctatgcttcaaacttcgttcgtattcaacaagtgcttaacattgcaagtcaacttaatcgtaaagtgtcatttttaggtcgttcacttgaaagttcgtttaacatagcacgtaaaatgggatactttgatataccaaaagatttattaatacctattaacgaagtggaaaattatcctaaaaatgaagtgattattattgctacaggtatgcaaggtgaaccagtagaagcattaagtcaaatggctcgcaaaaagcataaaattatgaacatagaagaaggagattcaatattcctagcaattactgcttcagctaatatggaggttattattgcagatacattaaatgagttagtgcgtgctggagcacatataattccaaacaacaagaaaattcatgcgtcaagtcatggttgtatggaagaattgaaaatgatgttaaatattatgaaacctgaatattttgtacctgttcaaggtgaatttaaaatgcagattgcacatgccaaattagcagcagaaaccggtgtagcacctgagaaaattttcttagttgaaaaaggcgacgtgattagttataacggtaaagatatgattttaaatgaaaaagttcaatcaggtaatatacttattgatgggattggcgttggtgacgtaggtaatatcgtattaagagacagacatctattagccgaagacggtatttttattgcggttgtgacattagatcctaaaaatcgacgtattgctgcaggacctgaaattcaatcaagaggcttcgtctatgttagagaaagtgaagaacttttgaaagaggctgaagaaaaagtacgtaaaattgtagaggaaggtcttcaagaaaaacgaatagaatggtcagaaatcaagcaaaatatgagagatcaaatcagtaagttactatttgagagtacaaaacgccgtccaatgattattccagtcatatcggagatctaa

SEQ ID NO: 8431 - DNA, 2394 bp, Staphylococcus epidermidis; identical to SEQ ID NO: 3075

SEQ ID NO: 8432 - DNA, 714 bp, Staphylococcus epidermidis
atgtcggaaatgagtgcaatctatagagtaaaacaatacattttaaatttaatcaaagatggtgaactaaccaatggaagtaaattacctagtaatttgtcaattgcgagagcattaaatgttaaaacagatgatgtttatgatggtatagatgagttgattactgaacaagtagtaacggataattttgaagaggggactagcgtaaaagtaaagccccctttctattacccgttaaataaaattattagtatagggactatgattaaagaagcgggttatgaagcaggaacagaatatctgaatcttgacgagcaatctgcaactattttagatgctgaacatttaggtatagaaacaaaagaacctataacaattattgagagactaaggactgctaatcataagcctgtcgtatattgtttagacaaaatagcaaaaacttatctaacttgtacagattatcaacagagtagtggttcaatgttagaagctattaaagcatctacaaatcatcaaatcatgcatgcagaaatggatttagaagcaattagttacgaaccccatatctctgaagtgcttaatgcttcacctcacgaagggcttatgttacttaaagtagtacattatgacgaaaagcatcaaccaattttgtattctttaaattatattaagagtagtttagttaaattcactattactaaaagtgaataa

SEQ ID NO: 8433 - DNA, 1272 bp, Staphylococcus epidermidis
ttgaagagattcaatcaagataacacaaaagttcgagtcaatgttttgcctaccgataaatttaaaacaacgacaattacatttaaatttatggcaccattaaactataaaacaattacttcacgttcaattttaagtaaagtattagttcgtgcaacacaacaatggcccaccgataaaactttaaataaacagttatcagaattgtatggcgcctatgttaatagttttgtttctaagtttaaagataagcatgttattacaatctcattagaagtagttaatgaaaaattcttaaaagataaaacccctttatttgaaaagggattagatacgttaaaagaaataatttggaatccattaatcaaagatagatgctttgatcatacatatgtagctcaagaaaagtctttacttagcaaaaaacttgaagcaatggaagataataaagcacagtattcatttcttcagttaatgaattatatgtttaaacaagaaccctatcgatatatagcgacaggtcaattagaacaaattccacaagtgacttctgaaagtctatacgatacatatctatccatggtacaaaatgatgattgtgccatatatgttgtaggaaatattaacaaagaggaagtaacgcaactaattctagataagtttgcaattaagcctttctatttagaaaataaagaaagtactgaaatcacaccttcttttgatcaaccgcaatatataattgaaaaagacgatgttgaccaagctaaattgaatttgggatatcgctttccatcttattatgggaaaagtaattactatgcatttatagtattaaatatgatgtttggaggagatccttcctcagtactatttaatgaagtcagagaaaagcaaagtttggcatactctatacattcacaaattgatggtaaaaacggatttttatttgttttaagtggtgtttctgctgagaaatatgagcaagcaaaagatactgtcatcaaagagtttgataagataaaaaatggagattttgattctaataaaattgaattagctaaaaaaatcattatttcccatagacacgaagcatcagatagacctaaaagtataattgaaatactacataatcaattattattaaaccgacagcaaactgatcaagattttataaatgcagttaatcaagtgacgaaaaaagatgttattaaattggcaaatgaagctgttctagatacaatttatgtactaacgaaaggagaccaacactga

SEQ ID NO: 8434 - DNA, 1290 bp, Staphylococcus epidermidis; identical to SEQ ID NO: 3078

SEQ ID NO: 8435 - DNA, 705 bp, Staphylococcus epidermidis; identical to SEQ ID NO: 3079

SEQ ID NO: 8436 - DNA, 828 bp, Staphylococcus epidermidis
atgacttttgcaaaaaggaaagagtggtacttagaatatgagataactgtaaatcgtgctggcttactcggtgatatttcaagtttgcttggaatgctcggcattagtattgttacaattaatggtgttgatcagggaaaaaggggattgttaattaaaacagatcaactagaaaaggtcgaaaggttcgaacaaattgtaaaagaaattaatgaaatagaaattacaaagttaagagttcctgaattacgagatagactcgctgtacgacacggtagatatattgaacaagatgctgatgataaaaagacttttaaatttgaacgagaagatttaggattacttgttgattttttagctgagttatttaaagaagaaggacataaattaatcggaatacgtggaatgcctagagttggtaaaactgaatctattgtagctggaagtgtttgtgcacataaaagatggttattcataagctcaactttaattaaacaaacagtaaggcgttcactatttaaaggtgaatatgattctaatcacgtatatatcattgatggtgcggtaacagcacgtgaattgaaccctgagcaccaagaattggtgagagaggttatgacgttaccctcaataaaagtagttgaacatccagatttatttgtagagtcgtgcaattataatatggaagattttgactatattattgaattgagagaaaatgaagatcaagagattcgatatgaagaaatgaagaaacatacggttcaaagcaagaataatttagattttggagatccatttggtggagggtttggtttctttgaataa

SEQ ID NO: 8437 - DNA, 393 bp, Staphylococcus epidermidis; identical to SEQ ID NO: 3081

SEQ ID NO: 8438 - DNA, 582 bp, Staphylococcus epidermidis; identical to SEQ ID NO: 5385

SEQ ID NO: 8439 - DNA, 1146 bp, Staphylococcus epidermidis
atgaatatttcaattgtagctgttggctctgaattattactaggtcaaatagctaatacaaatgggcaatatctttcaaaactttttaatagtattggtaaaagtgtagtagaacacacagttattggtgataaccctcaaaggttagaatatgtaataaagcaatgtctatctagatttgataccattgttttaacaggtggcttaggaccaacaaaagatgatttaactaaacatactgtagctaaagtattaggaaaaaatctagtgacggatgaagcatcgttaaactttatcaaaaactattttaaagaacaaggtcaagatatgacctctaataataagcaacaagcattagtaattgaagatgccatagttttaccaaataaaaatggtatggctcctggtatgcttgtagaattaggtaaacaaaaaataattctactaccaggtccaccgaaagagatgcaacctatggcgaagaatgaattattaccttatcttatggataaagatgaagttattttttctgaattacttagatttgctggtataggagagtcgaaattagaaacactattaattgatctaatagatgatcaaactaatccgacaatcgcacctcttgcaggtacgcatgaagtatattttagattaacagccaatgctgaaagtaaggaacgatgtcaactgcttattaagcctattcgagatgaaattttaaatagggttggtacttattattttggctcagacgaagttaatattgaagaatcggttataaatagtgcaaaacagaattttgctatttatgacggtgtaactaatggagctttgtttactcgattaaaaaatgctgacagtaaaaatctagttaaaggtatgctaccacattctaatcaatttattgatgtgacttctgagtttaatgccgtgttattcaatgcagcacaatatgtcagggatttgtaccaaacagatttgggtattgtacttttaaataaagataacattgtatatttaggaatttatgatggaaataatttcgatatcgaaacatttaagatgtctcaaagtcgtaatttattgagaagcagaagtcaaaattatgcaatgattagattattaaattggtttaataaatag

SEQ ID NO: 8440 - DNA, 1050 bp, Staphylococcus epidermidis; identical to SEQ ID NO: 5383

SEQ ID NO: 8441 - DNA, 1560 bp, Staphylococcus epidermidis
gtgaatttattaagcctcctactcattttgctggggattattctaggcgttgttgtagggtatattgttgcccgaaatttattacaccaaaaacaagttcaagcaagacaaactgccgatgatattgttagctatgctaataaagaagcagacaatattaaaaaagaaaaattacttgaggcaaaagaagagaaccaaattttaaaagaacaagctgagaatgaactgcgtgaaagacgtggtgaacttcaaagacaagaaacccgacttcttcaaaaagaagaaaatttggatcggaaatctgatcttttagataaaaaagatgagattttggaacaaaaagaatcaaaacttgaagaaagacaacaacaagtagatgcaaaagagagtagtgttcaaacattaataatgaagcatgaacaagaattagaacgcatctccggtctcactcaagaagaagctgtgaaagaacagcttcaaagagttgaagaagaactgtcacaagatattgcaatacttgttaaagaaaaagaaaaagaagcgaaagaaaaagttgataagacagctaaagaattacttgctacaactgtacaaagattagcagccgaacatacaactgaatcaactgtttcagtcgtaaatctgcctaacgatgaaatgaaaggtcgtatcataggtagagaaggtagaaatatacgcacattagaaacacttactggcatagatttaattattgatgacacaccagaagcagttattttatcaggttttgacccaattagacgtgaaattgctagaactgcactagttaatttggtttctgatggacgtattcatcctggacgtattgaagatatggtcgaaaaagctagaaaggaagtagacgatatcattagagatgctggagaacaagctacctttgaaataaatgtacacaatatgcatcctgatttagtgaaaattttgggtcgattaaattatcgaactagttatggtcagaatgtacttaaacattcaattgaagttgcccacctttcaggtatgcttgcagcagaattaggagaggatgttactttagctaaacgtgctggattattacatgatgttggtaaagccattgatcatgaagttgaaggtagtcacgtagaaataggtgttgaattagctaagaaatataatgaaaataacataattattaatgctattcactcacatcatggtgatgttgaaccaacctctatcatttctattttagttgcagcagctgatgcattatcagcagcgcgaccaggtgcacgtaaagagacacttgaaaattatattagaagacttgagagactcgaaacgttatctgaaagttatgatggggtagaaaaagcatttgctatacaagctggtagagagattcgtgtagtcgtctcacctgaagaaattgatgatttaaaatcatatagattggcaagagatattaagaaccaaattgaagaagagttacaatatcctggacatatcaaagtgacagttgttcgagagactagagcaatagaatatgctaaataa

SEQ ID NO: 8442 - DNA, 216 bp, Staphylococcus epidermidis; identical to SEQ ID NO: 5381

SEQ ID NO: 8443 - DNA, 795 bp, Staphylococcus epidermidis
atgagaatattgtttataggcgacatcgttggtaaagtgggcaggaaaatgattactacttatttacctaaaattaaacaaacttatcacccaacagtttctatagtaaacgctgaaaatgccgcacacggtaaaggattaacagaaaaaatttacaaacaacttttgagagaaggcgtggatttcatgactatgggtaatcatacatatggtcaaagagaaatttacgattttattgatgatgctcatcgaatggtgagacctgcaaattttcctgatgaagctccaggaacaggtatgagaataataaaaattaacgatattaaattggctattattaatttacaaggccgttcatttatgcaagacattgatgatccatttaaaaaggctgaccagctaatcgaagaagctcaaaaatctacaccatatatatttgtagattttcatgctgaaactacatctgaaaaaaatgctatgggttggtatttagatggtagagtgagcgctgttgttggtactcacacacatattcaaacttctgatgatcgtatattacctcatggcacaggatatatcacagatgtcgggatgacaggttattacgatggtattttaggtatcaatagagatgaagttattcaacgttttattactagtttgccacaaaggcatgttgttccagatgatgggcgaggcgtattatcaggagttatcatagatttagataaagaaggtaaaacgactcaaataaaaagactgttaataaatgaggaccatcctttccaaatttaa

SEQ ID NO: 8444 - DNA, 1761 bp, Staphylococcus epidermidis; identical to SEQ ID NO: 5379

SEQ ID NO: 8445 - DNA, 867 bp, Staphylococcus epidermidis; identical to SEQ ID NO: 3089

SEQ ID NO: 8446 - DNA, 618 bp, Staphylococcus epidermidis; identical to SEQ ID NO: 3090

SEQ ID NO: 8447 - DNA, 291 bp, Staphylococcus epidermidis; identical to SEQ ID NO: 3091

SEQ ID NO: 8448 - DNA, 1545 bp, Staphylococcus epidermidis; identical to SEQ ID NO: 5375

SEQ ID NO: 8449 - DNA, 366 bp, Staphylococcus epidermidis
atgtatagtgaaaaagaaatcatacgaaaagtcgaaagtttagcagagaaaattggaaaactagaagttgttcaagattatcataatgtagaaaaacaaattcataataatcaagcaataaaacaaaagatgaatcgtttgaaagcgcaacaaaaacaatcggttaattttcaaaattatggaaaacaaaatgcactcgagcaatctgaagttaaaattcagaatctaaaagatgaaattaatgaattacctattgttgaagaatttcgttcagcacaatatgaagcgaatgatttactacaaatgatggtcaaaacaatggaagatagactcaatgaatataataaaaaagaacacaatgaataa

SEQ ID NO: 8450 - DNA, 495 bp, Staphylococcus epidermidis; identical to SEQ ID NO: 5373

SEQ ID NO: 8451 - DNA, 2622 bp, Staphylococcus epidermidis
atggctaacattacaccaatgatgcaacaatatttaaagataaaatctgaatatgatgattgtttgctattttttagactcggagatttctatgaaatgttctttgatgatgctaaagaagcatcaagagtacttgaaataacattgacgaaaagagatgctaaaaaagaaaatcctattccgatgtgtggcgtaccatatcattctgctgataattacattgaaacattgattaataatgggtataaggtcgctatatgtgaacaaatggaagatccaaagcaaacaaaaggaatggttagaagagaagttgtaagaatcatcacaccaggaactgttatggatcaaaatggtatggatgaaaagaaaaataattatattttaagttttatcgaaaatgaagaatttggattatgctattgtgatgtttctacaggcgaactcaaagtaactcatttcaaagatacagcaaccttgcttaatgagattacaacaattaatcccaatgaaatcgtcataaagcaagctctatctgaagaattaaaaagacaaatcaacatgataactgagacgattactgttcgcgaagatatatctgatgaagattatgatatgaatcagttgacacatcagttaatgcatgacacaactcaattattgttagattacattcatcacacacaaaagcgagatttatctcatattgaggaagtaattgaatatgctgcagttgattatatgaagatggattattatgcgaagcgaaatttagagctgacagagagcatacgattaaaatcaaaaaaagggactttgttatggttaatggatgagacaaaaacaccgatgggtgctagacgtttaaagcagtggattgatcgtccattaattaataaacaacaaatcaacgacagattaaatattgttgaagagtttatggaccgttttattgaaagagatacattacgtaatcatttaaatcaagtgtatgacatagaacgactagtaggaagagtgagttatggaaacgtaaatgcaagagatttaatacaacttaagcattctatatccgaaatacctcacattaaagcattactcaatgaattgggtgcacaaactaccacgcaatttaaagaattagaacctttagatgacttgttacaaattttagaagaaagtttagttgaagaaccacctatttccatcaaagatggaggattatttaaaaatggcttcaacgcgcaacttgatgaatatttagaagcttcaaaaaatggtaaaacttggcttgcagaattacaagctaaggaacgtgaacgtacaggtattaagtcattgaaaattagttttaataaagtgtttggttattttattgaaattacacgtgcaaacttaaataattttcaacctgaagcgtttggctataatcgaaaacaaacattatctaatgctgaacgatttattacggatgaattaaaagaaaaagaagatataatacttggtgctgaagataaagcagtagagttagaatatgaattatttgttaaattacgagaacacattaaaacgtacactgaacgtttacaaaagcaagcgaaaatcatttcagaacttgattgtttacaaagttttgctgaaattgctcaaaaatataattatgtcaaacctacatttagtgatgataaagttttacatttagaaaactcaagacatcctgttgttgagagagtgatggattataatgattatgtacctaatgattgccatcttgatgatgaaacgtttatttatctcattacgggacctaatatgtcaggtaagtcaacatatatgagacaagttgctataataagtatcatggctcaaatgggagcatatgtaccatgtgattcagcaacattacctatatttgatcaaatttttactaggattggtgcagcagatgaccttgtatcaggtaaaagtacatttatggtagaaatgttagaagctcaaaaagctttaacttatgctactgaaaatagtttaattatctttgacgaaataggaagaggtacatctacttatgatggtcttgcgttagcgcaagcgatgattgaatatgttgctcaaacttcccatgctaagacacttttctcaacacattatcatgaattgacatcacttgatcaaatgcttaagtgtttaaaaaatgtacatgttgctgcaaacgagtatcaaggtgaactgatatttttgcataaagtcaaagatggcgctgtggatgatagctatggtattcaagtggcaaaattagcggatttacctaatgaagtcattgatagagcgcaagttatattaaatgcatttgagcaaaaaccttcgtatcaactctctcatgagaatactgacgatcaacaaacggttccgtcgtataacgattttggtcgaacagaagaagagcaatcagttatagaaacacatacatcaaatcataattatgagcaagcgacctttgatttatttgatggttacaatcaacaaagtgaagttgaatgtcaaattcgagaattgaatctatccaatatgacaccattggaagccttaatcaagctgaatgaattacaaagtcaattaaagtag

SEQ ID NO: 8452 - DNA, 1938 bp, Staphylococcus epidermidis
atggggaaaataaaagaacttgagacgtctctagctaataaaatagctgcgggtgaagtggttgaaagaccaagttccgtagttaaagagctcttagaaaatgcaattgatgcacaagcgacagaaattaatattgaagttgaacagtctggagtttcatcaataagggttgtagataatggcactggtattgctcaggaagatttagggttagtatttcatagacacgcaacgagtaaaatagtcgcagatgatgatttgttccatattcgtactttaggttttaggggagaagctttagctagtatttcatcagtagcaaaggtgacattaaagacctgtactgataatgaaaatggacatgaaatatatgctgaagatggtaaaattattcatcaaaaacctgcaaaagctaaaaagggtacagatatacaagtggattcattattctacaatacacctgctcgattaaaatatataaaaagtttgtataccgaactgggtaaaattacggacattgtaaatagaatggcgatgagtcatcccgaaattagaatttctttagtttcagatggtaaaaaacttttaagtacgaatggctcaggaagaacaaatgaagtaatggctgaaatttatggaatgaaagtagcaaaggatttagtgcatatttcgggtgatactagtgattatcatcttgaagggtttgtagctaaacctgagcattctagaagtaataaacattacatttctattttcatcaatggtagatacatcaaaaactttgtactcaataaagcaattttagagggatatcacacattgcttacaataggaagatttcctatatgttacattaatatccaaatggatcctattttggttgatgtaaatgttcatccaacaaaattagaggtgagactttctaaagaagatcaactttatgatcttatcgtaaccaaaatcagagaggcttttaaagacaaaatcctcatcccacaaaacgatttaaatcacgcgcccaaaaagaataaggttttagaaacatttgaacaacaaaaaattaatttcgagaagcaacaatcacaaattggagaaacatctgcaccatatgtacatgatcaaaaagataagaatcatgatgtagagtcgcataagaataatttagattcaacttcatcgacaaataatgaaagtacggaagtttctaatgaattacacaattacattgatgatagttacttacaaagtcaaaaagaagtattgtttgatatggaacaaaacacatctaacgaatatgagatatcaaatcagcaatcaaacgatattaaaggaacagtgagtcagacacctcatcgtagggtgccttatatggaaattgtaggtcaagtacacggtacgtatatcattgcacaaaatgaaaatggaatgtttatgattgaccaacatgctgctcaggaaagaattaaatatgaatattttagagaaaaaattggcgaagtgaccaatgaagtgcaaaacttattaataccacttactttccatttctctaaagatgaacaaatgattattgatcagtacaaagatgaattagataaagtaggagtacatcttgaacattttggtgggcatgattatattgtaaatagctatccagtatggtttccgaaagaagaagcggaagaaattattaaagatatgattgaacttgtcttaaaacacaaaagtgttgatgtgaagaaaataagagaagatgcagcaatcatgatgtcttgtaagaaatcaattaaggctaatcactatttaaaaaataatgaaatggcagatttaattgatcaactaagagaagcagaagatccttttacttgtcctcatggtagaccgattattatcaatttttcaaattatgaattagaaaagttatttaaaagagtaatgtag

SEQ ID NO: 8453 - DNA, 534 bp, Staphylococcus epidermidis; identical to SEQ ID NO: 5370

SEQ ID NO: 8454 - DNA, 825 bp, Staphylococcus epidermidis; identical to SEQ ID NO: 3098

SEQ ID NO: 8455 - DNA, 1500 bp, Staphylococcus epidermidis
atggaaaaatatattttatcaattgatcaaggaactacgagttcacgtgcgatactttttaataaagaaggagaaattaaaggtgtttctcaaagagaatttaaacaacactttccacatccaggctgggtagaacatgatgctaatgaaatatggacatctgttctatcagttatggctgagttacttaatgaaaacaatattaatgcaaatcaaattgaaggtattggtattacaaaccaacgtgaaacgacagttgtatgggataaaaatacaggtcgtccaatctatcacgctatcgtttggcaatcacgtcagacacaagatatttgtacaaatttaaaggaacagggttatgaagaaacatttagagaaaaaacaggtttacttttagacccgtactttgcgggaactaaagtaaaatggattcttgatcatgttgaaggtgctagagaaaaagctgaaaatggtgatttactcttcggaacaatcgattcatggttagtatggaaattgtcaggacgtactgctcatattacagattacactaatgcaagtcgtacattaatgtttaatatttatgacctaaaatgggatgatgagttgttagaacttttaaatattcctaaacaaatgttacctgaagttaaagaatcaagtgaaatttacgggaaaactatcgactatcacttctttggtcaagaagtacctattgctggtattgccggtgaccaacaagcagcattatttggtcaagcatgttttgaccgtggtgatgtaaaaaatacatacggcacaggtggatttatgctaatgaatactggtgaagaagcagttaagtcagaaagtggcttgttaacaaccattgcatacggtttagatggaaaagttaattatgcacttgaaggttcaattttcgtatctggttctgctatccaatggctacgagatggtttgagaatgattaattctgcgccacaaaccgaaaactatgcttcaagagtagagtcaactgagggtgtttatatggttccagcatttgttggtttaggtacaccttattgggattcagaagcaagaggtgctattttcggattatctcgtggtacggaaaaagaacatttcattcgtgctacattagaatctttgtgctatcaaacaagagatgttatggaagctatgtctaaggactcaggtattgaagttcaaaatttacgcgttgatggtggtgctgtaaaaaataacttcattatgcagttccaagcagatatcgtaaattcatctgttgaaagacctgaaatccaagaaacaacagcacttggtgctgcatatttagctggattagctgttggattctgggatgataaagaggatatccgtgaacgttggaaacttcaaactgagttcaaaccagaaatggatgcagatcaacgtcataaactttatagtggttggaaaaaagctgttaaggcgactcaagtatttaaattagaagattaa

SEQ ID NO: 8456 - DNA, 1674 bp, Staphylococcus epidermidis
atgtcattatctacattgaaaagggatcatattaaaaagaatttaagagacactgaatacgatgttgttatcgtaggtggcggtattacaggtgcaggtattgctttagatgcaagtaatcgtgggatgaaggtagctttagtagagatgcaagactttgcacaaggtacaagttcacgctcaactaaacttgtacacggtggtttaagatatttaaaacaactgcaagtaggggtagttgcagaaacaggtaaagaacgtgctattgtttatgaaaatggtccacatgtgacaacaccagaatggatgcttttacctatgcataaaggtggtacatttggtaaattctcaacttctattggactagctatgtacgatcgtctagctggtgtcaaaaaatccgaacgtaaaaaaatgttatctaagcaagaaacgttaaataaagaacctttagttaaacgtgatggattaaaaggcggtggctactatgtggaataccgcactgatgatgcgcgtttaactattgaagttatgaaaaaagctgctgaaaatggagcagaaatcattaattatacaaaatcagaacacttcacttatgattccaataagaaagtaaatggtattgaagtattggatatgattgatggcgaaacgtatgcgattaaagctaaaaaagttattaatgcttctggtccttgggttgatgaagtgagaagtggcgattatgcacgtaacaataagcaattaagattaactaaaggtgtacacgttgttatagatcaatctaaattcccattaggtcaagcagtttactttgatactgaaaaagacggacgcatgatttttgcgattccacgtgaaggaaaagcttatgtaggaacaactgacacgttttatgataatgaaaaagcaacacctttaacaacacaagaagatagagactacttaattaatgcaattaactatatgttcccaacagttaatgttaaagatgaagatattgaatcaacatgggctggtattcgtccgctaattcttgaaaaaggtaaagatccttctgaaatctcacgtaaagatgaagtttgggaaggtgaatctggattattaactatagcaggcggtaaattaactggttatcgtcatatggcactagaaattgttgatttattagctaaacgtttaaaacaagaatacggattgaaatttgaatcatgtgccacaaaaaatctaaaaatttccggtggtgacgttggcggaagcaaaaactttgaacactttgttgaacaaaaagttgatgcagctaaaggatttggaattgatgaagatgtggcacgtcgcttagcaagtaaatatggttcaaatgttgatcaactatttaatattgctcaaacggcaccatatcatgatagtaaattaccattagaaatttatgttgaattagtttatagtattcaacaagaaatggtttacaaaccaactgacttcttagtacgtcgttctggcaaattatactttaatattcaagatgtgttagattataaaaatgctgtgatagatgttatggcggatatgcttaattatagtgaaactcaaaaagaagcttatactgaagaagtagaagttgcgattgatgaggcacgtacaggtaatgatcaacctgcaactaaagcttaa

SEQ ID NO: 8457 - DNA, 927 bp, Staphylococcus epidermidis
gtgagtcaaagtcattttaaaataacagttgaagatggaacaatgttagaggtgaaaattgataaagcaaaaaagagtactattggtattgttcatcttttccatggcatggctgaacatatggaccgttatcaagagttagttgaggctttaaatacacaaggttatgacgttgttagacataatcaccgtggacatggtaaagaaatagatgagaatgaacgtggtcattttaatagcatgaatcaaattgtagatgatgcttatgaaattattgagacattatatcttgaagagctcaatgtaccctatattatcataggtcattcaatgggctccattattgctagatcatttgttgaaaagtatcctgacattgctcaaggtttaattcttacaggaacaggtatgttccccaagtggaaaggtgtaccaatacgtttagcaatgaagttagttacatttatttttgggaaacgacgtcgactcaagtgggtgaatcaattattgaataaaactttcaataaaaaaatcactcaacctcgaacagatagtgattggatttctacacgtcaggatgaagttgataaatttgtggaagatgaattttgtggattcaaagtatctaatcagctcatttatcaaactttaaagaccatgatgaagacagtagaacgacaacaactaaaaagaatggacaaagaactacctatactatttatttctgggaaagatgatccttttggtgaatatggtaaaggtataaagcatttagctagattatataaaagagcaggtattaaacatataacagtacaactatataaacataagcgtcatgaaatattatttgaagaagattatttgaaaacatggcaacacatgtttgaatggatggaaaagcaaattttgaaaaaacaaaagtga

SEQ ID NO: 8458 - DNA, 999 bp, Staphylococcus epidermidis; identical to SEQ ID NO: 3102

SEQ ID NO: 8459 - DNA, 240 bp, Staphylococcus epidermidis; identical to SEQ ID NO: 3103

SEQ ID NO: 8460 - DNA, 477 bp, Staphylococcus epidermidis
atggaaagtatttatgattttgttgtacaaaaaaacaatggtgaaagttataaattagagcagtataagggtgacgttatgcttattgtcaacactgctagcgaatgtggttttacacctcaattcgaaggtttacagaagttatatgatgagtataaggatcaaggatttattattttaggatttccatgtaaccaatttggcggtcaagaaccaggatcgggagaagaagctgctcaaaattgcaaaattaactatggtgtgactttccctattcatgaaaaagttgatgttaaaggtgataatcaacatccattatttcactttttaacaaacgctgctaaaggtatgataaacgaaaaaatcaaatggaatttcactaaattcctaatcgaccgtgaaggtaatgtgattaaacgtttctcccctcaaaagaaaccggaacaaattaagactgaaattgaaaaattactataa

SEQ ID NO: 8461 - DNA, 1242 bp, Staphylococcus epidermidis
gtgacacagcatgcgacttatagaacaaaaaataaacgagaaactgctgtattaatcggtgtacatgctcaaacggatcgtcaatttaattttgaatctactatggaagagctcgatgctttatcacaaacttgccaacttaatgttaaaggacaaatcactcaaaatagagagcaatttgaccataaatattatgttggaaaaggaaaaatcgatgaaataaaatctttcatagaattccatgatatagatgttgtcgtaaccaacgatgaattaacgacggcacagtctaaaacgttaaatgataatttgggcattaaaatcatcgatagaacccaattaattttagagatattcgcgttgcgagcgagaagtagagagggaaagctacaagtagaacttgcacaactcgattatttgttaccaagactacatggtcatggtaaaagcctatctcgtcttggtggtggcataggaacaagaggcccaggtgaaacaaaattagaaatggatcgtcgccatattagaacacgtatgaatgagattaaacatcaattaaaaacggtcgtggatcatcgggaaagatatagaaataaacgtgaacaaaatcaagtttttcaaatcgctttagttggttatacaaatgcaggaaaatcgtcatggtttaatgttttagctaatgaggagacctatgaaaaaaatattttgtttgcaacattagatcccaaaacacgacaaatacaagtgaatgaaggatttaatttaattatttctgatacggtaggatttattcagaaattaccaacgacattggtggctgcgtttaaatctacactagaagaagctaaaggtgcagacgtacttatgcatgtcgtcgatgcaagtcattcggaataccgtactcaaattgacactgtaaatcaaattattaatgatttagatatggaccatattccacaagtagttatttttaataaaaaagacttatgtaacgaacagatggatgtacctgtatctaaatctgcgcatgtttttgtatctagtcgtgatgaaaatgataaacaaaaggtgaaaaatttagtaattcaagaaataaaaaatagtctcagcccatacgaagaaattgtagatagtgctgatgcagatagattatattttcttaaacaacacacgcttgttactgaattaatatttgacgaaacacaagcatcttatcgtatcaaaggatttaaaaaattataa

SEQ ID NO: 8462 - DNA, 1239 bp, Staphylococcus epidermidis
atgcaagattttagcaatttagttgaagaagttgaaaacacacttattccttactttagaaaaattgaaaagcgtgcattatttaatcaggaaaaggtcttaaatgcttttcaccatgttaaagctagcgaaagtgatttacaggggtctacgggttatggatatgatgattttgggagagaccatttagaacaaatttatgcgcacacatttaaagcagatgacgcacttgtaagacctcaaattatttcaggtactcatgctattactttagctttacaaagtacgttaaaaaacaatgatgaactactttatattacaggtagtccatatgatacacttctagaagtcattggtataaatggcaatggtgttgaaagtcttaaagaatatggtgttcgctataatgaagtcgaattacgtgacggtcgaattgatattcctaaagtcatcactgcaattaatgacaatacaaaagttgtagcaattcaacgatcaaaaggatatgatcaacgtccatcaattacaattaatgaaattgaacaagcaataacatctattaaagaggtttatcccaatatcattatttttgttgataattgttatggagaatttgtagaagataaagaaccgattgaagtaggtgctgatttaatcgccggatcattaattaaaaatccaggtggaggtttagctaaaattggaggatatattgctggtagacaagacttaattgaacgctgtggttatcgtttaacagcaccaggcattggtaaggaagcaggagcctcacttaattctttacaagaaatgtatcaaggattctttctagcgccacatgtggttagccaaagtttaaaaggtgcactgtttactagtttgttattagaaaaaataaacatgaagacctcccctaaatataatgtttatcgtacagacttaattcaaacggttcaatttgagaccaaagagcaaatgatttcattttgccaaagtatacaacacgcttcaccaattaacgcacattttagtccagaacctagctatatgcctggatacgaagatgatgtcatcatggctgcaggtacatttattcagggctcgtctattgaattatccgcagacggacctatacgtccgccttatgaagcatatgttcaaggtggtttaacttatgaacatgtcaaattagctgttacacgtgcggtgcaacatatgcaagaaaacaatttactataa

SEQ ID NO: 8463 - DNA, 366 bp, Staphylococcus epidermidis; identical to SEQ ID NO: 3107

SEQ ID NO: 8464 - DNA, 1341 bp, Staphylococcus epidermidis; identical to SEQ ID NO: 5359

SEQ ID NO: 8465 - DNA, 648 bp, Staphylococcus epidermidis; identical to SEQ ID NO: 5358

SEQ ID NO: 8466 - DNA, 354 bp, Staphylococcus epidermidis; identical to SEQ ID NO: 5357

SEQ ID NO: 8467 - DNA, 195 bp, Staphylococcus epidermidis; identical to SEQ ID NO: 5356

SEQ ID NO: 8468 - DNA, 168 bp, Staphylococcus epidermidis
atggagaacaatcaaagtaatattactgaagaaacgaaacacaatgataatttagaaacaacttatgaacaaacgcaacaaaaagagaaaacattctctcaagaagaagtatctcaaatgattaaggatcgtttagctagaaaaaaaagaaatctgaataacgtatga

SEQ ID NO: 8469 - DNA, 384 bp, Staphylococcus epidermidis
atgaaagatgcaattcaagaagctgaaaaactagccaagatgaataaagaccaaaagaatcaatatgagttggaaaagctgttaaaagaaaatgaagaactaaaagcagaaaaagctttatctcaaatgaagaatgagactcgttcaatgcttaatgagtcaggtttagaaaacttcgatgatcaaattgttaatatattagtaaatactgatgctgaaaaaacaaggaaaaatgttgaatcatttactaacttacttaatcaaatggtaaaatcaaatgttgaaaaagcattaagacaagactcaccagtaagcactcaatcaaataaaatgacaaaagatgaagaatcagattatcttgtttcagggagaaaatgtctataa

SEQ ID NO: 8470 - DNA, 684 bp, Staphylococcus epidermidis
atgcaacaagaacgacaatcgtggtaccaaaaatcttggtttattattctcacattgctatttatttttccattaggtctctttctaatgtggaggtatgcgcattggaagaattggttaaaattgactgtttcatcagtctatattattagtttagttttaacacttttatttcaagttagtctattaaatgagaataaaacaaatcaaatagaacatgcatcaactatgaaagaaaagtctaatataaataatgtaaaaacaactaaaaataaaaatatggaaaaatcaacgcagacagacaaacaaaactctgtgaacttaaagcaaaacacaaaagatcaaaataataacgcaaatgatgaagcagcttctccaactagcgaacaaaatgcagctatagcacaagcaaagtcatatgcaaatacattacctatctctaagaaaagtttatacaaacaattaacttcggaatacggagagaaatatccggcagacatagcacagtatgctgttgaccatatcagtgtagattataaaatgaatgcactgagattagcaaaaagttacgtaaaaaatataaacatttctaatcaagcgttatatgatcaactcgtttcagaaaatggagaaggatttactcctgaagaagcacaatatgcaatgaatcatttagataggtaa

SEQ ID NO: 8471 - DNA, 1026 bp, Staphylococcus epidermidis
gtgatttcatttgaaaatgattatttagaaggtgcacatgaaaaagttttaaatcgattagtagagacaaatcgaatacaagctgctggatatggcttcgatgacttttcggcacaagctgcagataaaattagacaacgtattgactgtccagatgctaccattcgttttttagtaggtggtacgcaaaccaatcaagtagttattaactcaatgcttgatagttatgaaggtgttatatccgctgatacaggacatgtggcagtccatgaaggtggtgcgatagaattcagtggacataaagttctaaccataccctcccaagaaggtaagattactgctcaagacgttgagaattatatagaaacttttgaaagtgattttaaaaaagaacacatggtgtatccagggatggtttatatttcacatccaaccgaatatggaactttatacacgaaagaagaattacaatctttatctagagtttgccgtagacatcagattccactatttatggatggtgcacgtttaggctatggccttatgagcaatcaaactaatgtaactatcgaagatgttgcaaaatactgtgatgtgttttacataggaggtactaagattggagcactttgtggtgaagcaattgtcttcactaaacaaaatgaacctaaaaacttcactacaattataaaacatcatggtgctttattagcaaaaggccgtctaactggtgttcaatttttagaattattcactgatgatttatattttgatataagtcgacatgctattaaaatggctgaaaaggtaaaaaaaggatttatagataaaggatatcaagtctattttgattcaccaaccaatcaacaattttttattttaagcaacgataaaattgaagaactaaaacaaaaggtaaaattcgcagtttgggagaaatacgataatcaacatcgtgtagttcgcttcgcaacaagttgggccacaactgaagaaaatgttaatcaactacttgaactaatataa

SEQ ID NO: 8472 - DNA, 117 bp, Staphylococcus epidermidis; identical to SEQ ID NO: 3117

SEQ ID NO: 8473 - DNA, 198 bp, Staphylococcus epidermidis
atgcaacaaataaaatttaaaactttaactgaggaaacactggagagcttagagaaaagtgttaattcgtttttaaagtctcaagagggtaatggttacaaattattaaacattactattaaacaaatcgaagaacgtgcatttccgcataatgacgaggactttaatgctattttaacattggtaacggaagcatag

SEQ ID NO: 8474 - DNA, 1473 bp, Staphylococcus epidermidis
atgaattttggatttttgggtactattttaactatattgttagtagttgggtttataactaacgtagtattggcatttgtcatcattttccttgaacgtgatcgacgtactgccagttcaacttgggcgtggttattcgtattattcgttcttcctgtcattggatttattttgtatctatttttaggacgaacggtttccaagaaaaagatggaaaaaaataacggtgatgaattacatgcatttgaagatttagttcaagaccaaatcgacagttttgataaacataattatggttatatcaatgatcaagtcattaaacaccgtgatttaatacgtatgttgttaatgaaacaagatgcctttttaacagaaaataataaaatcgatttatttacagatggtcataagctttatgaaaaagtacttgaggatatttacaatgctcaagactatatacatctagagtactatacctttgaacttgatggattaggtaaaagaatcttagatgcacttgaaactaaacttaaagaaggtttagaagttaaacttttgtatgacgatgttggttctaaaaaggttagattatcaaaatttaaacatttcagagcattaggtggagaagttgaagcatttttcccttcgaaagtacctttaatcaatttcagaatgaataatcgaaatcatagaaagattatcattatagatggacaaattggttacgttggcggttttaatgtcggcgatgattatttaggattaggtaagttaggttactggagagatacacatacacgtgttcaaggtgaatgcatcgatgcactacaattaagatttattttagactggaattcacagtcgcatcgtccacaatttaaatttgatcaaaaatatttccctaaaaaaaatggggacaaaggaaacgcggctattcaaatcgcttctagtggacctgcatttgatttacatcaaatagaatatggttatacaaaaatgataatgagcgctaaaaagtctatctatctacaaagcccttactttattccagaccaatcatacattaatgcattaaaaatggctgctaatagcggcgttgaagtaaaccttatgataccgtgtaaacctgatcatccattcgtttattgggctacattttcaaatgcagctgatttattggatagcggagttaatatttacacttatcaaaatggatttattcattctaaaatattaatgattgatgatgaaatttcttcaattggtagtgcaaacatggactttagaagctttgaactgaatttcgaagtgaatgcatttatatatgatgaagatatagctaaacagttacgtcaagcatttgaaaaagatattgagcaatctaaattacttacaaaagaagtatacgacaagcgtccattatcaattaaatttaaagaaggactagcaaaattaatatctccaattttataa

SEQ ID NO: 8475 - DNA, 876 bp, Staphylococcus epidermidis
atgattgaactacgacatatatctaaatctttcaaggaacataaagttttagaagatataagtattgatataaaaaataattgttgtacggcattaataggtaaaaatggagcaggtaagtcaacgttaattgatattatcgttggaaataatcactatgatagtggtcaaatcgctgataaatcaaatttgttaaatagacataagatgggtattctttttcaaaaaacagagtttcctaaatacataaaggtttgcgaattattacatttatatcaatccttttatcaaacgtttatttcttttcatcagtttaaagaaatcacacaatttagtgaccgacaaatgaatcagtttgcatgtaatttatcaggtggacagcagaggattttagattttgctttagcattggtaggtaaacctgaactgttaattttagatgagcctacgtcagctatggatgtagaaatgcgtcaacatttttggaatgttatagataaattaaaaatgaataacactacgatactatatacctctcattacattgaagaagttgaaagaatggcagatcaagtaatgatgttagataaaggtaaaatacaattagatgattcacctgaaaatataaaaaggaatcaaagttattctgtaattcgaattccttgcaaatatcaagaacttatcaatcaactgaaacataaatacgaaattgaattaataaaaaatagatatgaaataaaaacaactgatgtgagtgatgttttacaattattgaaacaatatcatgtcaatttcaataagattgaaattcttaaaaaatctttattagaagtcatgttttctaatgatttgtctaaaggagggaattaccagtga

SEQ ID NO: 8476 - DNA, 732 bp, Staphylococcus epidermidis
gtgatatcaacttattttaaaatagaattaaagattatatttagaaagaaattgtatttagttatgtccatattcctacctgtcgtgttttatttattatttacttctatattagacatgccagaagaagcaaaacttaagttttataaagagtatatgtacagtatgacagtatttagtttaatgaacttttgtctattgtcatttccattagatttgattgaagagcgaaatcaaggttggtataagcggttaatggtgaccccattatcatcatttcaatattatttagttaaaattagtaagacaatgtgtcagtttttaatagcaattacaattattttttcagtagctcatttttacaaagatgttcacatgactgtttttcaatggatattctctgcattaactttatggattggggttagtttatttttgactttaggattgattatcgctcaactcaacgatattcaaaaagcaaatagttttgccaatttacttaatattacactagctatattaggaggtctatggtttccagtatacacgtttcctgattggcttcagtcgatttctaaacacatgccaacatataatttaaagctacttgctatagatttagcgcaaaataaaggggtgaatatagaagcgtttggctatctcgtggtctattgtataatctttgtgagtattgctttattcatgaataagaaaggagatgtacactaa

SEQ ID NO: 8477 - DNA, 1095 bp, Staphylococcus epidermidis
atggaatcaagaagttggggagtgagaataggggaattaagtactttaatatatttaatatttccgattttagctatatttgttgacaaacgtggtaatttcttaacttatttaattgtttgtactatttttataatcagctatgtgacgatgattatattttataaataccttagtgatagtattttatattcattactggttattcattatttaggaatcttttattttgtctatagtgtcaatcctatgaatagtttgtttttcttctatagtgctttcgccttaccttttatttttaatgttcgtgttgtatcaaaagaatttataacctttttaatagctatgataagttgtttaatactaacttatatatttaatccaacatttgtggttccattaagtgcattttatttggttatattaattgttgctgtaggtaattttaaaaatagagacgaacgaattatgaaagctaaacttgaagaaaagaataagtatattaatgtactaatagctcaacaagagcgtaatagaataagtcaagatcttcatgatacattaggacatgtatttgctagtcttactttgaagtctgaattagctgttaaactcatagatactaatccaaaagaagcaaaaaatgaaatgcaggcaataaatcaactttcaacagaagccttaaataaagtcagactcattattgatgatttgaagatacaatcttttgaagatgaaatttcatcattggaacacttattgcaaaatgctaatctacattttaaatttaacaataaaagtgcggctaaatcattaaatccagcgaaacaatcaatattatctatgatttttagagaagcaattaataatgttattaaacatgcgcatgcgactgaagtaataggtgaattgaaggtacatgagcatcaaatcattttaaaaattaaagataatggtgtgggaatagaaaatgaagatgcttcaaatttgaaaagtattaaagaacgtgtagattatttaaatggtaaattaattgtacaatcaaataatggaacacttattattgttgaaatacctagaggtgatttattatga

SEQ ID NO: 8478 - DNA, 603 bp, Staphylococcus epidermidis; identical to SEQ ID NO: 3123

SEQ ID NO: 8479 - DNA, 189 bp, Staphylococcus epidermidis; identical to SEQ ID NO: 3124

SEQ ID NO: 8480 - DNA, 537 bp, Staphylococcus epidermidis; identical to SEQ ID NO: 5664

SEQ ID NO: 8481 - DNA, 165 bp, Staphylococcus epidermidis; identical to SEQ ID NO: 5663

SEQ ID NO: 8482 - DNA, 873 bp, Staphylococcus epidermidis; identical to SEQ ID NO: 3128

SEQ ID NO: 8483 - DNA, 600 bp, Staphylococcus epidermidis; identical to SEQ ID NO: 3129

SEQ ID NO: 8484 - DNA, 1377 bp, Staphylococcus epidermidis; identical to SEQ ID NO: 3130

SEQ ID NO: 8485 - DNA, 1281 bp, Staphylococcus epidermidis; identical to SEQ ID NO: 3131

SEQ ID NO: 8486 - DNA, 1065 bp, Staphylococcus epidermidis; identical to SEQ ID NO: 3132

SEQ ID NO: 8487 - DNA, 921 bp, Staphylococcus epidermidis; identical to SEQ ID NO: 3133

SEQ ID NO: 8488 - DNA, 807 bp, Staphylococcus epidermidis; identical to SEQ ID NO: 3134

SEQ ID NO: 8489 - DNA, 156 bp, Staphylococcus epidermidis
atgtataaagactataacatgactcaacatactctactaatggaaacttcagttcttatccccgcgaatgatatttcacgacatctaaatgatattgcagaaacaattcccgatactgaattcgatgaattcagacatcatcgtggcttaatataa

SEQ ID NO: 8490 - DNA, 1683 bp, Staphylococcus epidermidis; identical to SEQ ID NO: 5289

SEQ ID NO: 8491 - DNA, 219 bp, Staphylococcus epidermidis
atggcagtatttaaagtattttatcaacataataaagatggagtcatcgttcgtgaaaatactcaaacaatttatgttgagggacaaactgaggaacaagtgagacgttatttgaaagaccgaaattttaatattgaatttattactaaattagagggcgcacacttagaatatgaaaaagaacattcaacacactttaatgtggagaacgccgaataa

SEQ ID NO: 8492 - DNA, 552 bp, Staphylococcus epidermidis; identical to SEQ ID NO: 4193

SEQ ID NO: 8493 - DNA, 627 bp, Staphylococcus epidermidis; identical to SEQ ID NO: 5286

SEQ ID NO: 8494 - DNA, 1113 bp, Staphylococcus epidermidis; identical to SEQ ID NO: 4191

SEQ ID NO: 8495 - DNA, 978 bp, Staphylococcus epidermidis; identical to SEQ ID NO: 4190

SEQ ID NO: 8496 - DNA, 1302 bp, Staphylococcus epidermidis; identical to SEQ ID NO: 4189

SEQ ID NO: 8497 - DNA, 1407 bp, Staphylococcus epidermidis; identical to SEQ ID NO: 4188

SEQ ID NO: 8498 - DNA, 279 bp, Staphylococcus epidermidis; identical to SEQ ID NO: 4187

SEQ ID NO: 8499 - DNA, 540 bp, Staphylococcus epidermidis; identical to SEQ ID NO: 4186

SEQ ID NO: 8500 - DNA, 1095 bp, Staphylococcus epidermidis; identical to SEQ ID NO: 4185

SEQ ID NO: 8501 - DNA, 804 bp, Staphylococcus epidermidis
atgcataatatcaataaatggttactggttccttacttattatggatggttatatttattatcattccagtcattttacttgtttacttttcttttatagatattcatggtcactttagtttcacaaattatgagcaggtattttcaacaagatatttaaaaatgtttattgattcaatatggtatgccgctttaattactatgattaccttaataataagttacccagctgcgtactttatttcttattcaagatttcaaaatatactgtttatgttgttaattatccctacttggattaatttacttcttaagacctatgcatttattggtttgttggggcatgatggagttattaaccaagctctacatatatttcaaatacctaaattaaatttgttgtttacaagtggtgcatttttattggtggcgagttatatttatatcccatttatgattttgcctatatttaacagcatgaaagcaattcctaacaatattttgcaagcctctaatgatttgggcgcgagtacatttactacgtttcgtaaagtaatcgttcctttaacaagagaaggtattaaaacaggtgtgcaagtaacatttataccagctctttcactgtttatgattactaggttgattgccgggaacaaagtaatcaatgtaggtacagcaattgaagaacagttcttaactatacaaaattatggattaggttccactatagcactttttctcattatttttatggcctttttactcattattacaaaatcaaaatcatctaatgggaaggggtga

SEQ ID NO: 8502 - DNA, 651 bp, Staphylococcus epidermidis
atgtcggtgatttttaatacagttgcagtggcacttttatctgcatcgattgctacagttataggtacatttggtgcgatcgctttatattacttacgcaacaaacggtttaaggttacgctattaacgatgaataatgtattaatggtatcttcagacgtagtcattggtgcttcttttttaattatgttcactgcaataggacatttcacaggtttaggtttaggattttcaacagtgctagcatctcatatagcgttctgtattccaattgttgttatcatcgtcttaccccaattatatgaaatgaatgataacatgttaaatgcagcaagagatttaggtgctaatgaatcacaattattaactagcattatcatacctaatattatgccctcgattataggaggattctttatggcattaacatattctctagatgattttacggtaagcttctttgttactggaaacggatttagtgtattgtctgtagaagtttatgctatggctcgaaaaggtataagtatggagattaatgccatttctacaataatatttattgctattatgtttggagtatttggatattactttattcaacatatcgttaatcgtcagaaaaagatgaagcgaggtgttaatgaatga

SEQ ID NO: 8503 - DNA, 1074 bp, Staphylococcus epidermidis
atgaagcgattttttcaacttatcatttctgctatagttattggtattttatgtttaatgattagtcattggtttaaatcaaaagataatacccactcaaatgagaaattatatgtttacaattggggagaatatattgatcctagcttaattaagaagtttgaaaaagaaacaggtatacaagtcgtatatgaaacctttgattcaaatgaagcaatggaagcgaaaattcgaaatggaggcacacactatgatgtagcttttccaagtgaatatactgttcaaaaattaaaaaaagctaaactgcttgagactttaaatcatgacaaaattccaaatatcagaaatttagacaatgattatatgaacttgtcatatgacccaaacaatcgatattcaattccatatttctttggtaccgtaggaattttatatgataaagagaaatatcctaatgaaacgttcgatagttgggacgatttgtatcattctcaattcaaaaatgatattttattagtagacggtgcacgcgagataattggaatgggattaaataaattagggtatagtcttaatgacaaaaatccgacccatatttatcaagcagaaaaagatttgcataatttagcacctcaagttagagggatagtaggcgacgaaattactatgatgcttcaacaaaacgaaggacatgttgcagtagtttggagtggcgttgctgcaccacttgtacaggaaaatactcgttataattacgtgatacctaaagaaggctctaacctatggtttgataatatggtgatacctaaaactgcacaaaataaagaaggtgcgtataagtttatgaatttcttactagacgcgcaaaatagtgcccagaatacggaatgggtagggtatgcaacacctaataaagcagctcgaagtaagttgcctaaaaaggtaagaaatgattatagattttatccatcaaatcaagaacagcaacggttagaagtctataaagatttaggtcaaacgtctctcagtgaatataatgaaagctttttaaattttaaaatgtctttaaaatag

SEQ ID NO: 8504 - DNA, 1152 bp, Staphylococcus epidermidis; identical to SEQ ID NO: 5275

SEQ ID NO: 8505 - DNA, 537 bp, Staphylococcus epidermidis
ttgaatagaaaagtagaaaaaagattagcgtggattgcaaatatcttgagcctattatttttaatttttggtattctatcgatatttgttattaataacacatcaaatcaacaacaatataatgaattaatgaagcagttttcaggtaataatcaagatatgtcatctgaaatgtttttagtttctcttattgcgtcattagtcattttaggtttttcaacgctattaggttttgttggtacaatggtaattgaaggtagaaaaaaccttgctgctagtttactcatagcagcggctatcgtaggtttatttacgactaatttaatcgcaatggttttatggatgattgctgcgattagactttttgcaaaaaaagataaaacagatgtaaatgaaaatgctacggctcaacttcgtcaaaaccattcaaagagccaaagtgattggaatcatcaacaaaaccaacaacataaagatgcttgggatcctgaacaagaaatcaacaaacaaaaaaaggacgatccatatatatattaa

SEQ ID NO: 8506 - DNA, 1347 bp, Staphylococcus epidermidis
ttgaattccaataataacaatcatgaacaacaacgaagtttagatgaaatcaataacaccataaacttcaatcataatgatagtgcaagtcaaaaatttctggcttttttaggaccgggattgcttgttgcagttggttacatggatcctggaaattggattacatccatgcaaggaggagcacaatatggctataccttgttattcataatcttaatctctagcttatctgctatgctgttacaaagtatgactgtgagattaggaatagcaactggtatggatttagcacaaatgacacgtcattttttaaataagcctgtagcaattatgttctggattattgcagaattagcaattatcgctactgatattgcagaagttataggcagcgctatcgcattagatttaatcttcggcataccattaattgtaggcgcattaatcactgtatttgatgtatttttattattattcatcatgaaatttggctttagaaagattgaagctatcgtgggaacattaatctttaccgtattggccatttttgtatttgaagtttatatttcttctccacatataatagatatgcttaatggttttgtgcctcataaagaaattattacaaaccaagggatactttatattgcactaggcatcataggtgctactattatgccacataacttatatttacattcttctattgtacaatctcgaaaatatgatagacacagtattcatgaaaaagcacaagcgattaagtatgctaccatagactctaatatacagctatccatcgcttttgtagtcaattgcttattacttacacttggtgcagcactattttttggaactaaaactgaagatttgggtggtttttatgatctttatttggctctaaaaacagaacctggtttaggtgcaacgcttggcggtattatgagtactttatttgctgttgcccttttagcttctggtcaaaattcaactataacaggaacgttagcaggccaaattgtgatggaaggatttcttaaattatccattccaaactggttacgtcgtcttatcactcggtctttagcagtgatacctgttatcatttgtcttatagtatttaaaggaaatactgaaaaaattgaacaattacttgtcttttctcaagtgttcttgagtattgctttgccattttcgttaataccgcttcaattagctacaagtaatcaaaatcttatgggtccttttaagaataagacatggattaacatcatttcttggttactcataattgtcttaagtggacttaacgtatatcttatcattcaaacattccaagaattatga

SEQ ID NO: 8507 - DNA, 612 bp, Staphylococcus epidermidis
atgacccaatatactttttcacctaaggattttaaagcttttgaagtcgaaggtttagaccaaagaatggaagcacttaatgactatgtcagacctcaacttcatcaattaggatcttattttgaagaatatttcactacacaaacaggtgaaactttttatgctcacgtagctaaacacgcacgtagaagtgtcaatccacctatcgatacatgggtagcttttgctcctaataaacgtggttataaaatgttaccacactttcaaatcggattgtttagaaatcagcttttcattatgttcggtatcatgcacgaaggtagaaataaagaagaaaaagtgaaaatatttgataaacattttgataaactgacatctttaccaagtgattatagtgtttctctagatcatatgaaaactgaaaagcactatatcaaggatatgagtaatgaagagttgcatgctgctatcgatagagttaaaaatgttaaaaaaggtgaattttttgttgccagaacattatcaccaaccgataaaagattaaaatctgataagtcttttctaaaatttgttgaggaaacttttgatgaatttttaaaattttatcaataa

SEQ ID NO: 8508 - DNA, 822 bp, Staphylococcus epidermidis
atggctttatatgattttgcaaaagggttgatactagaagcaggaaataaagtaaggttgatgatgcaagaagagttagacattaaaactaaatcgaacccaaatgatttagttacaaatgtggataaggcgacagagaattatctatatgaaacgattcttcataattatccagatcatcaggttattggcgaagaggggcatggtcataatctcgagtatttaaagggggttatttgggttattgatccaattgatggaacacttaattttgttcaccaaaaagaaaattttgccatctctattggtatttatcatgatgggaagccttatgcaggttttgtttatgatgtcatgaaagatgttttatatcatgcaaaggttggacagggtgcatttgaaaatacacataaacttgaaatgattcaaaatactgaacttaaaagaagtattataggtattaatcccaattggctgtcgaaaccaatactcagtgatatttttagttcaatagtgaatgaggcaagaagtgcacgagcatatggtagtgcagcattagaaattataagtgtagcgaagggtcaattggcggcttacctaacacctagactacaaccgtgggattttgcaggtggattgttgattttgaacgaagtaggtgggataggaactaacttattaggcgataaattagacttcaatcaaccgaattcaatattaatagcaaatcctagccttcatcgtgaaatattaaatcatcatttaaatcagcaaagagatacacttattacactccatgaaaaaaggtttggaaagagatag

SEQ ID NO: 8509 - DNA, 192 bp, Staphylococcus epidermidis
atgcaacaaaaaaaatctaaaggtattttctggatcttctcaatattggctgtcatttttttaactttatttagtttcgcattaggtgctgctaatgttccaatgatgattttaacatttatacttctcattgcaacatttggtgttgggttcagtgtgaaaaagaaatatcgtaaaaacaattggctttaa

SEQ ID NO: 8510 - DNA, 1848 bp, Staphylococcus epidermidis
atgactaatttaagagaagatgttcgtaatatagcgattattgcgcatgtcgaccatggtaaaacaacattagtagaccagttgcttaaacaatcaggtatatttcgtgaaaacgaacatgtcgacgagcgtgcaatggactctaatgatttagaaagagaacgtggtattacgattcttgctaagaatacagcgatagattataaaggaacgcgtatcaatatattagacacacctggccacgccgattttggtggtgaagttgaacgtatcatgaaaatggttgacggtgtcgtactagtggttgacgcatatgaaggtacaatgcctcaaactcgttttgttcttaaaaaagctttagaacaaaacttaaaaccggttgtagttgtgaataaaattgataaaccagctgctagacctgagggagttgtagatgaagtattagacttattcattgaattggaagcgaatgatgagcaattagacttcccagttgtttatgcttcagctgtgaatggaacagcaagtttagactctgaaaagcaagacgaaaatatgcaatccctatacgagacgattattgactatgtaccggcaccagtagataattcagatgaaccattacaattccaaattgctttactagattataatgattatgtaggtcgtataggcgttggacgtgtgttcagaggtaaaatgcgtgtaggtgataatgtatcactaattaaattagatggtacagttaagaactttcgtgtgacgaaaatatttggttactttggtcttaaacgtgaagaaattgaagaagcacaagcaggagacttaatagctgtttcaggtatggaagatattaacgttggtgaaacagttacaccacatgatcatcgtgacccattaccggtgttacgtattgatgaaccaaccctagaaatgacttttaaagtaaataactctccgtttgctggacgtgaaggtgattatgtaacagctcgacaaattcaagaaagattagatcaacaacttgaaacagatgtttctttaaaagttacacctactgatcaaccagattcatgggttgttgctggtcgtggtgaactacacttgtctattcttattgaaaacatgagacgtgaaggctttgaattacaggtttctaaacctcaagttattttaagagaaatcgatggtgtgttaagtgaaccatttgagcgtgtacaatgtgaagtgccttctgaaaatgccggggcagtgattgagtcattaggtgcacgaaaaggtgaaatgttagatatgatgacgacagacaatggtttgacgcgtttaatctttatggtacctgcacgcggtatgattggttatactactgaatttatgtctatgacacgaggttatggaattattaaccatacatttgaagaatttagacctcgcgttaaagctcaaatcggtggtagacgtaacggtgcattgatttctatggaccaaggtcaagcaacatcttatgcgattattaacttagaagatcgtggtgttaactttatggaaccaggtactgaagtatatgaaggtatgattgttggtgaacataaccgtgagaacgatttaacagtaaatattactaaagcaaagcatcaaacaaacgtacgttcagctactaaagatcaaacacaaacgatgaatcgtcctagaattttaacattagaagaagcgttacaatttatcaatgatgatgaattggtggaagtaactcctgaaagtattcgcttaagaaagaaaatacttaataaatctgcccgtgaaaaagaagcaaaaagagttaaacaattaatgcaagacgaacaataa

SEQ ID NO: 8511 - DNA, 1476 bp, Staphylococcus epidermidis
atgaaaaaattgattactcttattgtcatgatatcttttgttttagcgagctgtgggggcacatcaagtacagacaaagacaccctcaatgttgaaatacctttgaaaactaaatcaattgcaccttacgaaactgatatcccagttaaaacaggtgccttggaatcgctttttaaaatgtcgaagaatggtaaagtaaaacctttattagtcaaaaattatcatcaagtatctgacaatcaactagaactcactttaaaagataatattaaatttcaaaacggtcatcatttaacaggcgaagctgtaaaacgcagtctcgaagaaggaatgaaaaaaagtgatttgttaaaaggatcacttcctattaaatcaatcaatgctcatggacaaaaagtcacaatcactactaaagaaccttatccagaattaatgtctgaactcgcaagcccatttgctgctatttacgacacaaaagctaaaaacaaagtaactgatcaacctgttggtacgggtccttataaaattgatcagtataaacgttcgcaaaaaatcgtactaaaacaattcaaagactactggcaaggtacgccaaaattaaaaagaattaatgtcacttatcatgaagatggtaatactcgtgttgatcacttattatcaggcaaatcagatttgactactgatgttccaattgaacgcgttgatgatgtaaaaaaatctaacaaagcaaacattcaaagtacatcaggctttagaacgcatttaatgttatacaatcatgatagtaaaaaagttaataaaaaagtaagagaagcactagatatgattattaatcgaaaagacattgctaaaaatgtttctaaaaattatgctgagccagcatcaggtccttttaaccatcgattaaaatcattagaaaaagaggaaattcaatcacaagacatcaagcgtgcaaaagaacttttagctcaagaaggttattccaaatcgcatcctcttaaattaaacatggtcacatacgatggcagaccagaattgcctaaaattggacaggtgatacaatctgaagctaaaaaggcaaatgttgatatacaattacgcaatgtagatgatatcgaaggatatctcaaaaacaaacagagttgggatgtttcaatgtatagttatttaagtgtgccacgtggtgatacaggttatttctttaacactgcatacttacctgatggagcattaaataaaggtaattatagtaatactaaagtcactcagttaattaaagaattaaatactactttcggtgacaagcaacgtggtcaagtgactaatgaaatactaaatgaatctaaaaaagatattcctaacagctatatcacatacaactctcaaatagatggtgtgaataataaagtaagacattttaatgttacaccagaatctatctatttaattgattataaattaagtaaaaaagaataa

SEQ ID NO: 8512 - DNA, 720 bp, Staphylococcus epidermidis
atgataggtaatattctagtcgctcacggcatgagaaaaggaaatcagaatgaagctttagaagaatttatcggaactttattaaaagatgagcaatattattatgagttagcatttttagaaagtgaaacacaaaatcttgaaatcataatggagaagatgattaagcaaggaattacaaaatttcgtattgtacctttactcatttttagtgcaatgcattatatcagtgatattccacaaatacttaaagagatgaaagctcgatatccacaaattgatagtaaaatgagtgcgcctcttggtacacatccatatatgaaaacattagtagaaaatagaattgctgatgaaaaagtcagtgaaggttcaaccaaagcaactatagtaattgcccatggaaatggaagtggacgttttacgaaagcacatgatgaattaaaagcatttgttaaaacgcttgatagtcatcatcctgtttatgcaagagctttatatgggacattagcatttaaaaatgatttagataaaatctcagagcaatatgacgagttagtcattgtcccattatttttatttgatggtagattggtgaataaagtaaaacgtcttttaggtgaaatgacattgcatagtcaattacacattacgccatcgattaactttgatccaattttaagattaattattagagaaagacttgaagcgttagatatttaa

SEQ ID NO: 8513 - DNA, 2406 bp, Staphylococcus epidermidis
atggcaaaacaaaaacttgtaatgattggtaatggtatggcaggtttaagaacgatagaagagattttagaacgttcacaatcacaatttgatattactattattgggaaagaaccttatccgaactataacagaattatgttatccaatattttacagaagaaaatgaccgtcgaagatacaattatgaatccttatgattggtatcaagagaataatattgaacttataaataatgatccagtggaaaaagttgataaagaaaacaaaatagttactacttctaaaggtattgaagtagagtatgacatttgtattttcgctactggatcaaaagcttttgtattacctataccaggttcaaatcttcctagtgtcattggatggcgaacaattgatgatacaaataaaatgattgaaattgcccaaacgaaaaaacgcgcagttgtcattggtggaggtcttctaggcttagagtgtgccagaggacttctagatcaaggaatggaagtgacagttcttcatttagctgattggctcatggaaatgcaattggatcgtaaagccggagaaatgcttaaagcggatttagaaaagcaaggtatgaagattgaacttcaagcaaattctaaagaaatcattggtgataaagatgttgaagctattaaattagctgacggtcgggtgattgaaacagatttagtagttatggctgttggtatcagaccttatactgaagttgctaaagatagtggattagatgtcaatagaggtattgttgtaaatgattatatgcaaacatctgattctcatatttatgcagtcggtgaatgtgccgaacatgatgggaaagtttatggattggtggcgccactttatgaacaaggcaaagtgctagcagattatttaactggtaaagaaacaaaaggttataaaggatctactactttcacttcacttaaagtatctggttgtgatttatatagtgcagggcaaattgttgaagatgaagatgtccatggtgtggaaatttttaatagtgtcgacaatatctacaaaaaagtgtatttaagtcagggtcaagtcgttggtgctgtcttgtatggtgatactgatgatggatcacgattttataatatgatgaaaaaacatgaaacgcttgaagattatacacttgtttctttattgcataaaggtgatgaagatgcggggacatctattgctgatatgtctgatgatgaaacgatttgtggatgtaatggtgttgataaaggaacaatcgtcaatgctattacaagtaaaggtttaacgtctgtagatgaagtgactaaagcaacaaaagcaggtaattcatgtggtaagtgtaaaggtcaaatcggtgagttattacaatatacattaggtgacgactttattgctgcaaaaccaacaggtatttgtccatgtactgatttaacaagagaccaaattgtaactcaaatcagggctaaaaatctcaaatcatcaaaagaagtacgacacgttcttgatttcaaagataaagatggttgtcctaaatgtcgacctgcaattaattattatttaaatatggtttatccttttgaacatcgagacgaaaaagattctcgcttcgctaatgaaagatatcatgcaaatatacaaaatgatggtactttctcagtgattcctcaaatgcgcggtggtgttacagatgctgaccaactcattcgattaggagaagttgctaaaaagtataacgtaccacttgttaaagtaacaggttcgcaacgtgtaggtttatatggattgaagaaagaagaattaccacaagtttggaaagatttaggaatgcgttctgcttctgcttatggtaaaaagacgcgttctgttaaaagttgcgttggtaaagagttttgtcgttttggtacacaatacacaactcgactaggaataagacttgaaaaaacatttgaatatattgatacacctcataaatttaaaatgggagtatcaggttgtccgagaagttgtgtagagtctggtgttaaagattttggcgtcatatctgttgaaaatggctaccaaatatttatcggaggtaatggtggtactgatgttactgtaggtaaattgttaacgacagttgaaaccgaagatgaagtgattcaattatgtggtgccctcatgcagtattacagagaaacaggtgtttacgctgaaagaacagcaccatggttagaacgtatgggctttgaaaatgtcaagaatgtcttattaaatcaagaaaagcaaaaagaactgtatttaagaattatggaagccaaaaaagctgttgagaatgaaccatgggaaactattgttgaaaataaagaagcacaaaaaatctttgaagttgagaaggtgtaa

SEQ ID NO: 8514 - DNA, 315 bp, Staphylococcus epidermidis; identical to SEQ ID NO: 7142

SEQ ID NO: 8515 - DNA, 936 bp, Staphylococcus epidermidis
atgtctataacttatcctggcacagtatatctaatcggtgcaggaccaggcaatccaaacttattaactaaaaaagctgaacggttaattagatcagctgacgtgattttatttgatcgtctcgtaaatcctttcatcttacagtatgcttcttctcaaacaaaagtgatcaatgtgggaaagaaaccttattgtaaacacattcaacaagaggagattaatcaaaaaattgttgaagcagctaatcaatatcaatgtgtggtgagactaaagggaggagatcctgcgatttttggtagaattacagaagaagtacaaacattagaaaatcatcatattcattacgagattgtccctggtgtgacatcagcaagtgctgccgtagcaactatgaatatgggattaacgatgcgttctatcgcaccgagtgtgactttctcaactggtcattttaaagattcggttaatcacgatacggatattaggaacttgattaatggaggcactttagctatttatatgggtgtgaaaagattaggtcaaattattaaacaaattgaatcatatacgaatgaagactaccccattgcaatagtgtttaatgcttcctgctacaatgaaaagattgttataggtcatttaagtacgattgaagaacaattggtttctcaacaactagaaggtcatccaggcatatgcattttaggtaatatacttgatgacattaatcgtacgttattgaataataataagaatgacaagggaaatctatatttaatcaagggagataaagaacgtgcaattgcaaaggctgaaactttatatgatgaaggaatccaatgtctgattgattttgaccatagctaccacatttctcaacaaaacgtgtataacgaaatgattaaacacaagagtattaaaacaatatatgtataa

SEQ ID NO: 8516 - DNA, 3684 bp, Staphylococcus epidermidis
atgggaaaatttggattgaatttctttaaaccgacagaaaagtttaatggaaattggtcggtattagagcataaaagtcgagaatgggaaaagatgtatagagaaagatggagccacgacaaagttgtgagaacgacgcatggtgttaactgtactggatcatgttcatggaaagtatttgtcaaaaatggcgtaattacatgggaaaatcaacaaattgattatccaagttgtggacctgatatgccagaatttgagccaagaggttgtccgagaggtgcatcattttcttggtatgagtatagtccgttaagagttaaatatccttatattagaggtaaattattagatttatggaccgaagcgcttgaagaacaaaagggaaaccgaattgcggcatgggcatccatcgtagaaaatgaagaaaaagccaaacaatataaagaagcaagaggtaaaggtggacacgtcagagcaaattggaaagatgccacagatatcattgcagctcaaattttatacaccataaaaaaagatggaccggatcgtattgctggatttactcctattcctgctatgtcgatgattagttatgcttcaggagcaagatttattaatttgttaggtggagaaatgttaagtttttacgattggtatgctgatttaccacctgcatctccacaaatttggggtgagcaaacagacgtgccagaatccagtgattggtacaacgcctcatacataatgatgtggggatcaaacgttccattaacacgtacacctgacgcacattttatgactgaagttagatataaaggggcgaaagttatttcagtagcacctgattatgctgagaatgttaagttcgccgatcattggcttgcaccacatccggggacagatgcagcggttgcacaagcaatgacacatgttattttacaggaatattatgaaaatcaaccgaatgatatgtttattaactatgctaagcaatattctgatatgccgtttgtcattatattagatgaagatgagaatggctataaagcaggtagattcttgcgtgcttctgatttagggatgtcaggtgaaaataatgaatggaagccagttattcaagacaaattgagtcaacaattacttgttcctaatggcacaatggggcaacgctgggaagaagggaaaaaatggaatttgaaacttgaaacagaggatggtacaccaattgatccaatgttatcaatggttgaaagtgactatcatgttgaaacgattcaatttccatattttgatagcagtggtgatggtatctttgagagacctattgcaacgagaactattcagttagctaacggagaagaagttaaaattgctacggtttatgatttaatgacgagtcaatatggtgttcaacgttttgaacacgaactagaagctacatcttatgatgacgcatcttctaaatatactcccgcttggcaagaacaaattacaggtatcaaaaaagaattagtgacgaaagtggcaaaagaatttgcacaaaatgctattgatactggtggacgctcaatgattattatgggggctggtatcaaccattggtttaactccgatactatttatcgttcaattcttaacttagtactattgtgtggttgtcaaggcgttaacggtggtggttgggcacactatgtaggacaagaaaaatgtcgaccaattgaaggatggaatactattgcattcgctaaagattggcaaggtcctccacgtttacaaaatggtacaagttggttctatttcgctacagatcaatggaagtatgaagaatcaaatgtagataaattaaaatcaccattagctgaaaatattaagcatcaacatccagctgattacaatgtaacagctgctcgtatgggctggttgccttcatatccacagtttaataaaaacagtctattatttggtgaagaggctaaagatgaaggtgatgattcaaatgaagccatcttacaaaaagcgattgaatcagttaaaaataaagatacacaatttgcgatagaagatccagatttaagaaaaaaccatcctaaaacattatttgtatggagatctaatttaatttctagttcagctaaaggacaagaatactttatgaagcacttgttaggtgcgcgctctggtttaatggcagagccaaatgaagatgataaaccagaggaaattaaatggcgcgaggatacagaagggaaacttgatttattagtatcacttgatttcagaatgactgcgacgccattatattcagatatcgttttacctgctgcaacttggtatgaaaaacatgatttatcttctacagacatgcatccatttattcatccatttaacccagcgattgacccattatgggaatcgcgttcggactgggatatttataaaactctaagtaaagctgtttcagaaatggcgaaagattatcttccaggtaaatttaaagatgtcgtaactacaccattaggacatgattcaaaacaagaaatttcaactgaatacggtattgtaaaagattggtctaaaggagaaattgaaggtgtgccaggtaaaacaatgcctaatttttctatcgtagagcgagactatacacaaatttacgataaattcgttactgttggtccaaaactagaaaaagggaaaataggtgctcatggtgtgagttatagcgttagtgaagagtacgaagaacttaaaagtatagttggaacttggaatgatgataatactatttcagttaaaaatgatagaccgagaatagatacagcgagaaaagtagcagatgtcattttgaatatatcctctgctacaaacggcaaattatcacaaaagtcatatgaagatttagaaaatcaaacaggtatggaacttaaagatatttctaaagaacgtgcttctgaaaagatatcattcttaaacattacttctcaaccaagagaagtgattccaactgcagtattccctggctctaataaagatggaagacgctactcaccgtttacaactaatgttgaacgtttagtgccatttagaacactaactggacgtcaaagttattatatagatcatgaggtattccaacagtttggcgaaagtttaccggtatataaacctactttacctccaatggtatttggtgctcgtgataaaaaagttaaaggtggacaagatacattagtgcttcgataccttacacctcatggaaaatggaatattcattcaacttatcaagataatgaacgcatgttgacgttgtttagaggtggaccagttgtatggatttcaaatgaagacgcagctgaccatggtattaatgataacgactggttagaagtatacaacagaaacggagttgttactgccagagctgtaacatctcatcgtatgcctagaggcacaatgtttatgtatcatgcacaagataaacatatagagacacctggttctgaaattactgatactcgtggaggttctcataatgcacctactcgtattcacttgaaacctactcaattagtaggaggatatgcacaaattagttatcactttaactattatggaccaattggaaatcaaagagatgagtatgtagctgttagaaaaatgaaggaggtcaattggcttgaagattaa

SEQ ID NO: 8517 - DNA, 1554 bp, Staphylococcus epidermidis
ttgaagattaaagcgcaagttgcaatggtattgaatctagacaaatgtattggttgtcatacttgcagtgtgacatgtaaaaacacatggacaaatcgacctggtgcagaatatatgtggtttaataacgtagaaacaaaaccgggtgtaggatatccaaaaatatgggaagaccaaggacaatataaaggtggttgggtgctaaataaaaaaggaaagcttgaattaaaatctggtaacagatggtcaaaaattgctttaggtaaaatcttctataatccagacatgccactcattcaagattattatgaaccgtggacatataactatgaacacttaaccaatgctaaacaaggacagcactctcccgtggcgacagctcactctttaatttcaggtgatagattgaatcttaaatgggggccaaactgggaagatgatttagctggaggtcacattacaggaccagaggatccaaatattcagaaaatagaagaagatattaaattccaattcgatgagacatttatgatgtatttaccaagactatgtgaacactgtttaaatccaagttgcgtagcatcttgtccatcaggagctatgtataaacgagatgaggatggtatcgtactcgtcgatcaagaagcctgtcgaggttggagatactgtatgactggatgtccgtataaaaaagtatattttaactggaaaacgaataaagctgaaaaatgtacattttgtttcccacgaatcgaagctggtatgccaactgtttgttccgaaacttgtacaggacgtatgagatatttaggtgttttattatatgacgcagatcgcgttcaagaagcggcttcagctaaagatgaaaaagacttatacgaaaaacaattagacctattccttgatccatttgatgaggaagtcattgcacaagctgaaaaagatggaataaatcaagaatggattacagcagctcaaaactcaccagtgtataaattggcaatagaatataaaatggcctttccattgcatcctgaatttagaactatgccgatggtgtggtattgtccacctttaagtcctattatgagttatttcgaaggtgaaaatgcaggtcaaaatccagatatgattttcccagctattgaggaaatgcgtttacctattcaatacttagcaaatttattaactgctggcgacacaaaacctgttaaagagggcttacaaaaaatggcgatgatgagaagttatatgcgttctcaaataacaaaccaacctttcgatacttctaaattagaacgattaggacttactgaaagacagatgactgaaatgtatcgcttactaggtattgctaaatatgaagatcgttttgttgtgccttcttcccataaagaaacatatttagatacttataaagcgcaaggaagtcaaggttacggtggagagtactttggctctaattgtgaaggttgtggtgttgcagttcaatcaggtaaaactggacaagaaatttataatgaaaatttctatggagggatcttccgtgattaa

SEQ ID NO: 8518 - DNA, 603 bp, Staphylococcus epidermidis
atgaaaatttctatggagggatcttccgtgattaaccttgaacaattaagtctataccaagatagcttaggctatcttggtcaacaaatgaattttccagaaaaaatgacatttcatccaaaaatatttgaagaaactatttctaagtctcaccccggctacgaagatttgcttgcatatagagaagtcatgatgaattatactttgtcagaaattaaagctatctatacagatacatttgattttagtaaaaaacacccactctatatgacatttaataaatttgacacgcaaaaagaacggggtcaaatgctagctaaattaaaggttttatacgaaatgtttggactaaaaatggttgataatgaattatctgattttctcccattgatgctacagtttttgcaagttgctgattttaaaaatgatagtcgagcacaggaaaaccttcaacttgtcattatgattattgaagatggtacgtatgaaatggcaaataccctagctgaaaacaataatccctatgcatatgttgtcagtgcattaagaaaaactttaaaagcgtgtatcgtgcctttgaaagaggtggaaaatcatgcttaa

SEQ ID NO: 8519 - DNA, 678 bp, Staphylococcus epidermidis
atgcttaatcaatttgtatgggttatttatccatatttatgtttagcaatatttgttattggacatatcgcaagatataaatatgatcaattttcatggacagcaaagtcgagtgaaatgattgaaaagaaacgattaaaatggggaagtttactttttcatttaggtattattccggtattctttggtcatgttgtgggattattgattcccgctaattggttagaggcgataggagtaaataatcatatctatcatataggtgcagtttatataggtagtgtttttggtataataacattaataggaatgttgttgctaactttaagacgactatccatcaaaaacgttagacgattaagttcattttcagatatatttgtgaatatcgttttgttgattattttaataatgggttgttattctacgcttgtaaccaatgcgattcaacctgaatttgattatcgtcaaaccattgcgatatggtttagacatttattcatgttttctccaaatgctgacttaatgttaaacgtgccttggtcgtttaaactgcacatattattagggtttacagtgtttgcgtgttggccatttactcgtttagtacatgtttggagtgtaccactgtcttatatgaacagaagatatattgtttatcgcaaaaacaaaatttaa

SEQ ID NO: 8520 - DNA, 453 bp, Staphylococcus epidermidis
gtggaaccagaatctttaaaacataatcaacatttacaaatgaatttagataagttgagagcacaagagggttatgattttggtggtatcgctttatatgattatcatcacacttcatcaccaattaaatggcaatatgtttcaggtaacacaaatgatagatataaacttatcattttgagaaagggtagagggcttgctggaatggtgatgaaaaccggtaagcgtatggttattgctgatgtagatacagctttatctccagaagagaaagttaaatttccaatcattcttagtgagtcattgacagctgtagttgcagtccctttatggttagaaaattcaatgtatggcgttttattattaggtcaaagaaatcatcagccgttacctcagtcattggaccaacttaatattgaaaaacaaatcggtatttttacagaaataaactag

SEQ ID NO: 8521 - DNA, 1035 bp, Staphylococcus epidermidis; identical to SEQ ID NO: 7135

SEQ ID NO: 8522 - DNA, 657 bp, Staphylococcus epidermidis
gtgaaaatagttatagcggatgaccatgcagttgttaggacaggattttcaatgatattaaattatcaagaagatatggaagttgttgcaactgcagctgacggggttgaagcttatcaaaaagtgttagaacatcgaccagatgttttaattttagatttgagcatgccgccaggagagtcaggcttaatcgcaaccagtaaaatttctgaaagttttcctgatactaaaattttaatacttacgatgtttgatgacgaagaatatttatttcatgtgttaaaaagtggtgctaaaggatacattttaaaaaattcacctgatgagcaattaatattggccgtacgtacagtatatcaaggtgaaacttatgttgatatgaaattgacgacgtctttagtcaatgagtttgtcaatcaatcacaaacggatgaagtgtcatcatcttcagatccatttaaaattttatcgaaacgagagttagaaatattacctcttatagcaaaaggctatggcaataaagatattgcagaaaagttgtttgtatcggtgaaaacggtagaagcacataaaacgcatattatgacgaaactaaatttaaagagtaaacctgaattagttgaatatgccttaaagaaaaaattattagaattttaa

SEQ ID NO: 8523 - DNA, 1164 bp, Staphylococcus epidermidis
atgaacatgaaaaagggtgtttctcagcttacgttacagacattgagtttggtcgcaggctttatggcatggagtatcatttctccattaatgccatttatttcacaagatgttgatatttctccaggacaaatatctgtcattttagctattcctgttattttaggttctgtactacgtgtaccatttgggtacttaactaacattgtaggagcgaaatgggtgtttttctggagttttattgtactattacttccaatttttcttttaggtcaagctcaatcacccggtatgctaatgttatcaggattctttctaggaattggtggcgcaattttttcagtaggtgttacttcagtacctaaatacttttcaaaagacaaagttggtttagcaaatggtatatatggtgtaggtaatattggtactgcagtttcatcattttgtgccccagtgttagcaggtgcaattggctggcaaaatacagttcgtagttatttaattattctaagtatatttgcaattttaatgttttttttaggagataaaaatgagccgaaagtgaagattcctttgatggctcaagtcaaagacctatctaagaattataagttgtattatttaagtttgtggtattttattacttttggagcttttgtggcttttggaatctttttaccgaacttcctagttgatcattttagtattgataaagtggatgcaggtattcgttcaggtatatttatagcactagcgacattcttaagaccggttggtggtgttataggtgataaatttaatgcagtacaagcgcttatcatcgacttcgtgataatgattattggtgcacttatattaagcttatctagtcatattgttctgtttacgataggctgtttagcaattagtatctgtgcgggtataggtaatggtttaatatttaaattagtaccttcatacttttctaaagaagcaggttcagcgaatggtattgtatccatgatggggggactaggcggtttcttcccaccactagtgattacttttgtaacgagtatcactggttcaagtcatctcgctttcttcttcttagctatatttggtgtaattgctcttattacaatgattcatttaaataaaaaagaaaaagctgttcgtatataa

SEQ ID NO: 8524 - DNA, 447 bp, Staphylococcus epidermidis
atgtatgtagagaatagttatttgagcaaacaattatgttttttattttatgtttcctctaaagaaatcatcaaaaaatatacagattacctaaaagagtatggtcttacatacacaggttatattgtattaatggcgatagaagatgatgagaaacttaacattaaaaaactaggcgaaagagtcttcttggattctggcacgctgacaccattattaaaaaaattagagaaaaagaattatgtcattcgaactcgtgaagaacatgatgaacggaaccttcaaatttctttaacagaacgtggcaaggatattcaaaatgttctatctgatatttcacaaagtgtttttaatgaatttaatattactcaagaagaaacccaaaatttagttgaagacttgcaaaattttgtaacgaaaaattttgataaaacagtggaaaagtga

SEQ ID NO: 8525 - DNA, 630 bp, Staphylococcus epidermidis
ttgacacgtataaatgattttaacgaagtgcttaacagtagaaaatcagtaaaggtatttgacgagaattataaaattcctcgagaagaaatggatgaaatcattactaaagcaactaaagcaccttcatcggttaatatgcaaccatggagaattgctgttgtagaaagtgatgaaatgaaagaaaaagttaaagaatcatttggattcaattccagacagttaactacatcctcagctatgttaattatttttggagatttacaaaattacgaaaaagctgaacagatttatggcgatgctgtagaacaacaattgatgacagaagatatcaaagcacagctattagattggatattaccctattataaaaacttatctagagaaggcatgaaagatatagtgaatatagatagtagtttaatggcaatgcaattaatgcttacagcgaaagctcatggatacgatacaaaccctattggcggcttcgataaagaaaatattgcggatattattggttatgattctgacagatatgtgccagttttagcgattgctataggtaaaaaagcacaagatgcacacgattcagtgagacttccgattgatgatgtaagggaatttttataa

SEQ ID NO: 8526 - DNA, 366 bp, Staphylococcus epidermidis
atgagtaagaaacaggttatttttagggtaatcattattttgattatctctctaatattagcaattgcatttttcttcggactcaaagcttatcaaggtcataaaaatcttgaactgattgatagctatatgagcgaccatcatcttaatgataaagtgaaaaaagacaaaacatcatatagcactaaaaaggggctatactataaagaagttgttttcaaagatgaacctaacgtgacatatgtgattcaacctatcagtacttcaaaaggaatattcattgaaggttttgatagcgaaacgaagaaaagtattaaaaaagcaaaacatagtgattttgatcaaaaatataaaccttctaaataa

SEQ ID NO: 8527 - DNA, 1281 bp, Staphylococcus epidermidis
atggctctattcaagaaaaaaataagtctaccaacgcaagtaattattgctttggtactcggtgtcatcgctggtctattactatatggacaagatgatgttgcaaattatattaagccatttggtgatgtgttcttaaatttaattaagatgatcatcattccgattgtattttgttcattagccttatctatttcaaatttaggggattctaaaaaggtaggaagctatggatggaaagcaatcctttatttcgagattattacaactatcgctataggtttaggtcttatcattggtaatctattcaaaccaggttcgggtctagatccagataaattacctaaaggcgatattactaaatatcaatcatctgcacattcagcagaacaagcgactacttatggtaatcatcttatagatacattagttcatattgtgccaacgaatttatttgaatctatggcaaaaggtgagttattaccgattatctttttcgcagtattttttggattaggattagctgcgataggagaaaaagcagaacccgttaaaggattcttaaatggtactttagaagctgtattttggatgatcaataaaattttaaaattagctccaattggagtatttgcatttatctgtacgacagtaatgacttttggtgcttctgcattaattccattatttaaattattagttgttgtagtatttgctatggttttctttgttatagtagtattaggaattgttgcaagaatggttggaataagtattttttcaatcatgaagatacttaaaagtgaattgttacttgccttttctacttcaagttcagaagcagtattgccgattatgatgaagaaaatggaacgctttggttctccaaaagatgttacttcatttgttattcctatcggttattcatttaatttagatggctcagctttatatcaatctatagctgctttatttgttgctcaaatgtatgatatgcatttatcattaactgaacaacttgtattaatggccacacttatgattgcttcaaaaggtatggctggggtgccaggcgtatctattgtagttttattaacaacattaagttctatgaacataccagcacaaggtattgctttaattattggcgttgatcgtttattagatatggttcgtacctgtgttaatgttattggtaacgcactatcaacagttgttattgctaagtgggaaaacgtctatgataaagaaaaaggtcaaaactacttaaattcaatttaa

SEQ ID NO: 8528 - DNA, 396 bp, Staphylococcus epidermidis
atggtaacattatttacttcaccaagttgcacatcttgccgtaaagcgaaagcatggttacaagaacatgatattccgtatacggagcgtaacattttttctgaacatttaacaattgatgaaattaaacaaattttaaaaatgactgaagatggaactgacgaaattatttcaacacgttctaagacatatcaaaaattgaatgtggatatagattcattaccattacaagatttatactcaatcattcaagataatcctggcttgttacgtcgtccaattattttagatgacaaacgtttacaagttggatacaacgaagatgaaattcgtcgtttcctaccacgaaaagtacgtacgttccaattacaagaagcgcaacgtttagttgattaa

SEQ ID NO: 8529 - DNA, 990 bp, Staphylococcus epidermidis
atggaaactttattctcaggaattcagccaagtggtattccaacaattggtaactacattggtgcattaaaacaatttgtagatgttcaagatgactatgaatgttttttctgtatcgtagaccaacatgcaataacggtaccacaagaccgcttaaaattacgcaaacaaatacgtcaactcgcagcaatttatttggcaacaggtattgatccagataaatcgactttatttattcaatctgaagtccctgcacacgtgcaagctggttggatgcttacaacaatagcttctattggtgaattggaacgtatgactcagtttaaagacaaagctcagaaacgcgcagatggagtgcctgctggtctactcacttatccaccattgatggcggctgatatcgtgatttacaacactaacattgtccctgttggtgatgatcaaaaacaacatatggaactgacacgtaatttagtagatcgtttcaatagtagatataacgatgtattagtaaaaccagagatacgaatgcctaaagttggtgggcgtgtgatgagtttacaagatcctactaaaaaaatgagtaaaagtgatgataatcagaagaatttcatttctttattggatgaacctcatgtagctgccaaaaaaattaaaagcgctgtaacagactctgacggtataataaaatttgatcgtgagaataaaccaggcatttcaaatttgctttcaatatattctggtctaactaatgaatctattaagaatattgaatctaaatatgaaggtgaaggttacggtaaatttaaaggtgatttatcggaaatcgttaaagattttcttattaatttccaagaaaaatatgcaagcttttataattctgatgacctagatgatattctagataaaggtaaagaaaaagctcaaaaagcttcatttaaaacattgaaaaaaatggaaaaagcaatgggcttaggtcgaaaaagataa

SEQ ID NO: 8530 - DNA, 1644 bp, Staphylococcus epidermidis
atgaaagattttaaagtcttaattattttattaagtgtatgcataattttatctgcttgtagtaataagcagagtttatattcagaccaggagcaagtttttaggaaggtaatcacacaagatatgactacactagatacagctttaattacagatgctgtttctggtgatatagcagctcaagtttttgaaggattatatactttaaataaagaagacaaagctgaaccagctattgctaaatcttttccgaagaaaagtaatggtggcaaaacacttacgattaatttaagaaaaaatgcaaaatggtccaatggagattcggtaactgcatatgacttcgtatatgcgtggagaaaggtagttaatcctaagacggcttctgagtttgcatacataatgagcgatataaaaaatgcagatgaagttaatgcaggtaaaaaatcagtcaaggatttgggtatcaaggctataggtaaatataaattacaagtagatttagaaagacctgtaccttatattaatgaactattagcacttaatacatttaatcctcaaaatgagaaagttgctaaaaagtttggagaacaatatggtacaactgctgaaaaagcagtgtacaatggaccatttgaagtaacaaattggaaagtggaagataaaattcaattagttaaaaatgaacaatattgggataagaagaatgtaaaattagataaagtgaactataaagtattaaaagatcaacaagcaggtgcatcgttatatgatactggctcggtcgatgatactattataacttctgaacaagttgataaatatagaggagaatctgctttgaattatcgtttaacagcagcaacattctttattaaaatgaatcaaaaaacagttcctgaatttaaaaataagcatttaagattggctatatctcaagcaataaataaaaaagggtatgtcaattctgttttaaatgatggttcgctaccatcaaataattttactggagtaggaactgccgatacaccggatggcaaagattttgcaagaaccatcaaatcaccattaaaattcaaccctgatttagcgaaaaagaattggagagaagcacaaaaagaattaggaaaaaataaatttacttttacgatgaacacacaggatacacctgcttcaaaaattgctgccgaatatataaaatctcaaattgaaagtcatttgccaggtgtgacactcaaaattaaacaaatgccatttaaacaaaaaactactttagaattagcaaataactatgaagcaagttattcagggtggagtcctgattatcctgacccaacagcatttcttcaaacaatgacaaaaaataatgcacagaataatacagattggagtaataaagaatacgatcaattactcaaagatgctaacagcaagcttttacgaaagccaggtgaacgtaatacctcattacaaaaagcggaatatatcttattacatgaagcgccagtcgctcctgtttatcaaaaaggagaggcacacttaacgaatccgcaagtaaaaggattacaatatcacaaagtagggcctgaaacgacgcttaaacatgtctatattgataaatcaatcaatagggagacaggtaaatag

SEQ ID NO: 8531 - DNA, 942 bp, Staphylococcus epidermidis
atgagtaacgaaaatgtattattacaagttaaaaacttgaaacagtattttaatcaaggtaaacataatgaagttaaagcgattgataatataagttttgatgtttataaaggggaaactttaggtctagtaggagagtctgggtgtggtaaatcaacgactggaaaagccattatcaaattaaatgatattactgatggcgcaatcgagtatgatggtaaagatattcatcaaattagaaaacgtaaagagcgattgaagtttaataaaaaaattcaaatgatatttcaagatccttatgcatctctaaatcctcggttaaaggttatggatatcgtagctgaaggaatagatattcataaacttgctagtagtcagcgtgatcgaaagaaacgtgtatacgaccttttagaaacagttggtttaggtaaagaacacgcgaatcgttatccacatgagttttcaggcggacaaagacaacgtattggtatcgcacgtgcattagctgtagagccagaatttattattgcagatgaaccgatatcagcattagatgtatcgattcaagctcaagtcgttaatcttttattaaagctacaacgtgaacgtgatattactttattgtttattgctcatgatttatcaatggtgaaatatatttccgatagaattgcagtgatgcacttcggtaaaattgtagaaattggaccggctgatgatatttataattatccattacatgattatactaagtcattattaagtgccattccacagcctgatcctgatgttgagagaaatcgtcaacgtgttttatatcatgaagatgcaacgcttaatgaagaacgtcaattaaatgaaattagaccacaacattatgtattttctactcaaaacgaagcagttaaattgaaacaaaagtatggtttgtctgttaaataa

SEQ ID NO: 8532 - DNA, 1080 bp, Staphylococcus epidermidis
atgacagaaacggtattagaagtaaatgatttgcatgtttccttttatattgctgcaggagaagtgcaagctgtcagaggcgtggattttcatttaaataaaggggaaacgttagcaattgttggagaatctggatctggaaaatctgtaacaactaaggcaattacaaaactttttcaaaaggatacaggaagaataaaaaagggagaaatcttatttttaggtgaggacttagctcagaaaagtgaaaaagaactgatacagctaagaggtcgagatatttcaatgatatttcaggatcctatgacttctttaaatccaacaatgcaaatcggaaagcaagtcatggaacctttgattaaacataagaaattaagtaaagcaaaggccaagcaaagggcattggaaattttgaatttagttgggttacctcgtgctgaaaaacgatttaaagcttatccacatcaattttcaggaggacaacgtcagagaatagttattgcaatagcattggcatgtgagcctaaaatattaattgctgatgagcctacaactgctttagatgtgacaatgcaggctcaaattttagatcttatgaaagaactacaaaataagattgaaacttcaattatctttattacgcatgatttaggcgttgtagcaaatattgcggacaaagtagccgtaatgtatgggggacagatggttgaaacaggggatgtgaatgaaatattttatgatcctaaacatccctatacctggggattgctttcttcaatgcctgatttaacaaccagtaatgacacagacttaattgcaattccaggtacaccaccagatttacttcatccaccaattggtgatgctttcgcacgtagaagtcgatatgctttagatattgattttaaagaagaaccaccttggttcaaaatctcacccacacattttgttaaatcttggttattagatgcaagagctccaaaagttacgccaccttcaatggttcaaaaacgattaagaacaatgccaagtaattatgaacaaccacaaagagtagagagggtggcttttaatgagtaa

SEQ ID NO: 8533 - DNA, 1071 bp, Staphylococcus epidermidis
atgagtaataaagaagatgttacaaacattaatggcgatatttctaatgcaacgatgtcacatacaagtaatgatatttcgaatacagattttattattagagatttagacttgaatcaagagccagaaatgccacgtcaaagtaagaatttttggcaagatgcttggtcacaattgaaacgtaataaattagcagtaatcggaatgataggtttgttgcttatagttattatggcatttataggaccattaatgaataaacacgattttgctgagcagaatgttgatcatcgtaatctcccagcaaaaataccattattagatcatgtttcatttttaccttttgacggtaaaggtacggacggtaaaaatgcttacaaagaagcaggtgcgaaagaaaactattggtttggtactgatcaacttggacgtgatttatggacacgtacttggaaaggtgctcaaatttcactttatattggtgtagttgctgcattattagatatttgtattggcgttgtatatggagccgtttctggtttctttggaggcagggtagatgatgtgatgcaaaggattttagaaattattgcttctatacccaatttaattgtcgttattttattcgtacttatttttgaaccatcaatttggactattatattagctatgtcaattactggctggctggggatgagtagagtggtacgtggagaatttttaaaattgaaaaatcaagaatttgttttggcatctcaaacattgggtgcttctaaattcaagttaatctttaaacatatattacctaacacattaggagcaattgtcgttacatcaatgtttactgttccaagtgcaatatttttcgaagcatttttaagctttattggaataggggtgcctgcacctaagacgtcattaggatctcttgtaaatgatgggcgtgcaatgttgttgatacatcctcatgaattatttattccagcaatcattttaagtttattgattttattcttctatctatttagtgatggactacgtgatgcattcgacccaaaaatgcgaaaataa

SEQ ID NO: 8534 - DNA, 927 bp, Staphylococcus epidermidis; identical to SEQ ID NO: 3516

SEQ ID NO: 8535 - DNA, 372 bp, Staphylococcus epidermidis
atgtccataaattcttatttgatttcgtcattatttacgccagttttatcaataattatatggttattttattcaaatcactttataaatttagtcaacatcttattttatacatcattcattatttttatagttgctttccttattttactcattcaagaaggaatatttgatgctacaagttttggatttcgtcgtttaaagtatcaactttcctcaactaagagaaaacgtacgatgaaaaatgaccactttttcaatccacaaaaagttaaaaaagaaagttatattatttccccatgggtagttccaacattgattattaacctcacttatataattgtgagtatcggagtatctttattaatataa

SEQ ID NO: 8536 - DNA, 1245 bp, Staphylococcus epidermidis
atgaataaaaataatagagttgttataacgggtatcggagccttatctccaattggtaacgatgctaaaacaacatgggacaatgcactaaaaggtgttaacggtatagataaaatcacaagaatagatactgatgattataatgtaaatcttgctggtgaattgaaagattttaatatagaagaccacattgatagaaaagaagctcgccgtatggatcggtttacacaatacgcggtggttgctgcaagagaagcggttaaagatgcacaattaaatattaatgaaaaaaatgccgaccgtattggtgtatggattggttctggtatcggtggtatggaaactttcgaagttgcacatacaacacttgtagaaagaggaccacgtcgagtaagtccatttttcgttccaatgttaattcctgatatggctactggtcaagtttctattgatttaggtgccaaagggcccaatggttctacagtaacagcttgtgctacggggactaattcaataggtgaggcatttaaaattattcaacgtggtgatgcagatgcaatggtgactggtggaacagaggcacctattacacatatggcaatcgcagggtttagtgcaagtcgtgcattatctacaaacaatgaccctgaaacagcttgtcgaccattccaagaaggccgtgatggctttgttatgggtgaaggggcaggtattgttgtacttgaatcattagattcagctaaagagagaggcgctgaaatttacgctgaagttgtaggttatggttcctctggcgatgcacatcatattacagcacctgcgcctgaaggtgaaggtggctcacgagctatgcaagctgctttagatgatgctggaatcaaagctcaagatgtacagtatttaaatgcacatggcacaagtacacctgttggagatttatatgaggttcaagcgattaaaaatacattcggtgatgctgcgaagtcattaaaagtaagttcaactaaatcaatgactggacatttattaggtgctacaggtggaattgaagctattttttctgcgctatcaattcgtgattcaaaggtagcccctacaatacatgcaatcacaccagacgaagaatgtgatttggacattgttccgaatgtagcccaagacttagacattatctatgcaatgagtaatagtttaggatttggtggacataatgcagtgttagtatttaaaaaatttgaagactaa

SEQ ID NO: 8537 - DNA, 942 bp, Staphylococcus epidermidis; identical to SEQ ID NO: 3513

SEQ ID NO: 8538 - DNA, 195 bp, Staphylococcus epidermidis; identical to SEQ ID NO: 3512

SEQ ID NO: 8539 - DNA, 2610 bp, Staphylococcus epidermidis
ttggatattaatcaaatgacatatgctgtacaaggtgccttacaaaaagcagtcgcgtacagtaaagaatatgaattacaaaacattgaagttgaagcattgttaaaagctgcaatgaatgaaaatgatagtttatttaaaagtatattagaacgagcaaatattgatgttgatcaattaataaaagcatacgataatcaattaagtcattatccaactgtacaaggtgacaatgttcagtatggacagtatattagtgctaaaacaaatgaattattagacaaagccgagaaatatatgaagtcctatgaagatgagtttatttctatggagcatatattacgtgcagccatagatactgatgaaactactcaaaaatgggtcggcaataaagtagaagtgataaaagaaattataactaaagttagagggggaaatcatgtgacatctcaaaatccagaagtaaactatgaagctttagaaaaatatggtcgtgatcttgtagaagaagtacgtcaaggtaaaatggaccctgtcatcggtagagatgaagaaatacgtaatacaattcgtatattaagtcgaaaaacaaaaaataatccggttttaatcggtgaaccaggtgtaggtaaaactgcaattgttgaaggtttagcacaacgaattgtacgtaaagacgttccagaatcattactcgataaaacgattttcgagcttgatttaagtgccttagttgcaggtgcaaaatatagaggtgaatttgaagaacgtttaaaagcagtattgaaagaagtaaaagaatctgaaggtcgaatcatcttattcattgatgaaattcatatgttagtaggcgctggtaaaactgatggtgctatggacgcaggaaacatgttgaaaccaatgcttgcgcgtggtgaattgcattgtataggtgctacgacattaaatgaatatcgtgaatatattgaaaaagattcagcattagaacgtcgtttccaaaaagttggggtcagtgaacctgatgttgaggatacaatatcaattttacgtggtctaaaagaacgttatgaggtctaccatggtgtacgtatacaagaccgtgcacttgttgcagcggctgagctatctgatagatatattaccgatagatttttgccagataaagctatagatttagtcgaccaagcgtgtgcgacaatacgtacagaaatgggatcaaatccaacagagttagaccaagtaaatcgtcgagtaatgcaattagaaattgaagaaagtgccttgaaaaatgaatctgataacgcaagtaaacatcgtttagaagagcttcaagaggaattatctaatgaaaaagaaaaacaatcctctttaaaatcacgtgttgaacaagaaaaagaaaaaattgctaaagtacaagaaaaacgtgctgaactagatagtagtcgtcaagctcttgaagatgcacaaacagaaggtaatcttgaaaaagcagcagaattacaatatggtacaattccgcaattagaaaaagaattgcaagaatttgaggaagcctttcaagatgaaactggcgaagatagtgaaagaatgattcgtgaagtcgtttcagatgaagaaataggcgacatagttagtcaatggacaggtatacctgtatctaaacttgtggaaacagaaagagaaaagctattaagtttaagtgacatcttacacaaacgtgtagtaggtcaagataaagcagttgatttagtatcagacgcagtagttagagcacgtgctggaattaaagatccgaatagaccaatcggaagtttcttattcttaggacctactggagtaggtaaaactgaattagcaaaatcgcttgcttcatcacttttcgattctgaaaaacatatgattagaattgatatgagcgaatatatggaaaaacatgctgtatcacgtttaattggtgcacctccaggttatgtaggtcacgatgaaggtggtcaattaactgaagcagttagacgtaatccatactcagttattttgttagacgaagttgaaaaagcacatagcgatgtttttaatgtattacttcaaatactagatgaaggtcgtcttacggattctaaaggtagaagtgttgactttaaaaataccattatcatcatgactagtaatattggttcacaagtattacttgaaaatgtaaaagatgctggtgaaattagtgatgatacagagaaagcagttatggacagtctacatgcatacttcaaacctgaaatattaaatcgtatggatgacatcgtgttatttaaaccattatcagttaatgatatgagtatgattgtagataaaattttaacacaattaaatatgagattattagatcaacatatctcaattgaagtgacagaagaagcgaaaaaatggctaggtgaagaagcgtatgaaccacaatttggtgcaagaccattaaaacgctttgttcaacgacaaatagaaactccaattgcacgtatgatgattaaagaaagtctacctgaaggtacaataattaaagtagatttaaatgacaataaagaacttgattttaaggttgttaaacctacgtcttaa

SEQ ID NO: 8540 - DNA, 1824 bp, Staphylococcus epidermidis
atgagaaaaaaattaaataatgaatatcgctctgctaaaaaaatacgatatatgcctggattagatggtttgcgagcaattgcagtcattggtattattatttatcacttgaataaacaatggttaacaggtggttttttaggcgtagatactttttttgttatttcaggttatttgattacgagcttattacttaaagagtatgaagatactggaacaataaatcttaaaaatttttggattcgtcgtattaaaaggttattaccagcggtatttgcattaatagtagtagttggaattgcaactttattattgcaccccgaacatattgtaagagttaaacatgatatgatagcagcaatattttacgtatctaattggtggtatattgctaaagatgtcaattatttcgagcaattttcttttatgcctttaaagcacctatggtcactagccattgaagagcagttttacctctttttcccagcagtactcttattatttatggcaatagttaagaaaaagaaaaatgtcatactgatattttggatcatatccctggtttcattattaatgatggttgttatttctcaacctcacttgaaccattctagagtatattttggaactgatacaagattgcagacactgcttttaggtgtacttctagcatttatctggccaccttttaaattaaatcccaatccacctaaaggattaaaaactgtgattaatagtgcgggtatcataggacttacatttttaattctattattctttactgttagtgatgaaagtgattggatttataacggtggattttatcttatttcaacaatgactttgctaattattgcaagtgttgttcatccaacgacaattttagctaagttattaggaaatcctttatttgtctacattggaaagcgttcatacagtttatacttatggcattttcctgtaattagctttattcatagttattttattgatggtcaattaccaacttatgtttatattatggatatcgtaattactgtattattagccgaattatcatttagatatgttgaaacgccattaagaaaggaaggtctaaaggcttttacatttaaaaaaacttacaaacctcagtttattagaacaattgtaacgttaattatgttgttaccttttatttttatactagttggagctttcgataaattcggaaaagatacaatttcaaataaagcacaaacatttaatacaaacgaggctgatcaatatcttattcatatgataccgattgataatatttcgttaactagcgatggtaaaaccaaagagaataagaaagacaatgatgtatatacacaaattaagccattattaattggtgattcagttatggtagatataggggaacaatttaaaacgaaagtacccaaagctaaaatcgatggcaaagtcggtcgtcaactctatcaggccgagagcctcgttaaaaatcaatatagacattacaataaaccatcagaccaaatcatacttgagttaggtacaaatggtgattttacaaaagaacaattagataatttaattgacaaatttggcaaagcacaagtgtatcttgtgaatacaagagtgccaagatcatatgaaagtcatgttaatgagttgatggcaaaagcagctaaaaataaaaagaatgtaaccctaattgattggtatagtcgctcaaaagggcatacagagtattttgctccagacggaatccatcttgaaaatgatggcgtagaggcattgacagatgagatattaaaaaatataaagaagaaataa

SEQ ID NO: 8541 - DNA, 309 bp, Staphylococcus epidermidis; identical to SEQ ID NO: 3550

SEQ ID NO: 8542 - DNA, 822 bp, Staphylococcus epidermidis
atgcaaccttatttaatttgtctagatctagatggtacattattaaatgacaataaagaaatctcaccttacactaaacaagtattaaccgaattacaacaatgtggacactacgttatgattgctactggaagaccctatcgcgcaagccagatgtattatcatgaactaaatatgagcacacctgttgttaactttaatggagcatttgtacatcatccaaaagcaaacgattttaaagtgatacatgaagtacttgatgtggaaatttctaaaaatattattacagcacttcaacaatctcatattacaaatatcattgctgaagtaaaagactatgtctttataaatagttatgattcaagactttacgaaggtttttcaatgggaaatcctaaaattcaaacaggtaatttacttgaaaatcttaatgaagcacctacgtcattacttgttgaagcagaagaagaaaatattcctgaaattaaagatatgttaacacatttttatgcagaaaatattgaacatcgtcgttggggcgcaccgtttccagtaatagaaattgtgaagcgtgggattaacaaagcacgtggaatcaagcatgttcaaaactatttaaacatcgccgacgatcatatcattgcgtttggtgatgaggacaatgatatagaaatgataaagtttgcgacccatggcattgcaatggccaatggcttgaaagatttaaaggaaatagcaaatgagactacgtatagtaataatgaagacggaataggtcgttatttaaatgacttttttaatttgaaaatacgttattattaa

SEQ ID NO: 8543 - DNA, 1317 bp, Staphylococcus epidermidis
atgaataaaattataatagtcggtgcagttgctggtggtgcgacttgtgcaagtcaaattcgaagattagataaagagagtgaaatcattgtttttgaaaaagatagagacatgagctttgctaattgtgcattaccttattatattggcaacgttatcgaggaccgtcgtaaagttttagcatacacgcccaatcaattttatgacaaaaagcaaatcactgtaaaaacataccatgaagttatacaaatcaatgatgagagacaaacagttactgtcttaaatcatcaaactaatcaaacttttgaagaaagttacgatacattgattttaagtcctggcgcatctgcaaatcgattaaacactcatagtgatatctcatttactgtgcgaaatctcgaagatactgaaacaattgatacctttattacgaataccaaagcacaacgtgcacttgttgttggcgcgggttacatctctttagaagtccttgaaaatttacatcatagaggtttggatgtcacatggattcatcgctctacaaatattaataaactgatggatcaagatatgaatcaacccatcatcgacgaaatagaaaagagaaatatcacttatagatttaacgaagaaattagtcacgtaaatggacatgaagttacattcacatctggtaaagttgaaaactttgatcttattatcgaaggtgtaggtactcatccaaattcacaatttattaaatcatctaacgtcatactgaatgataaaggttatatcccagtaaatcataatttccaaacaaatataccaaatatttatgcattaggtgatgttattacttcacattatcgtcatgtgaatttaccggcacaggttccacttgcttggggagcacaccgtggtgcaagtattatagctgaacaactttctggaaattcgtctattcactttaaaggttatctaggaaataatatagtgaaattttttgactatacattagcaagtgttggcatcaaaccaaatgaacttaaaaatttcgattatgatatggttgaagttaagcaaggagctcatgcaggatattacccaggaaattcaccactacatttacgtgtttattttgaaaaagactcgagaaaacttatacgcgcagcagcagttggtaaacaaggtgccgataaaagaatagacgtattatcaatggcaatgatgaataatgctactgtggatgatttaacagaatttgaagtagcatatgcacctccttatagtcatccaaaagatttaattaatttaattgggtataaagcgcaataa

SEQ ID NO: 8544 - DNA, 156 bp, Staphylococcus epidermidis; identical to SEQ ID NO: 3547

SEQ ID NO: 8545 - DNA, 1335 bp, Staphylococcus epidermidis
gtgaaaaagtacttccagttcgataagcatgggacaagttataaaaatgaaattttaggtggaattacgacctttctatcaatggcatatattctagctgtaaacccgcaaattttaagtttagctggtgtaaaaggtgcaacaagtgatatgaagatggatcaaggtgccatctttgtagcgacagctttagcagcgtttgttggatcattatttatgggattaattgctaaatatccaattgctttagcacctggtatggggttaaatgcattttttgcttttacagtagtattaactatgggaattccttggcaagtaggattaacaggtgttctattctctggtatattttttgcattacttactgttactggtttaagagaagttattatcaatgctatccctcatcaaatgaagctagctgtttcggcagggattggtttatttatcacatttgtggggttacaaagttcagggataataattaaaagtgattcaactttagtaaaattaggacatttgactgaagcaccagtacttttagcgattttcggaatcattgttacggtcattttatatgctatgaaaattcctggttcaatttttataggaatgattgtaactgccgtagcgggtatgctaactggtcaaattcatccaccatcaggaataattggagaagttccaagtatcaagccaacctttggtgcggcatttgaatcatttaaagatcctggtcaactgtttactattcaattcctaattgttattttaacattcttgttcattgatttctttgatacagctggtacgttagtagctgttgccacgcaagcaggattgatgaaagataacaaattaccgagagctggaagagcgttattctctgactctttagcaactattgtaggttctgtgtttggtacaactaccacaacatcatatattgagtctacttctggcgtagctgtaggggctagaacaggatttgcaagtatagtcacgggtatttgtttcttattagcattattctttagtccgttaatagaagttgtaacaagtgcagtaactacacctgctttagttgtagtaggtgtattgatggcggctaattttgctgatataaattggaagcaatttgaagttgcagtaccagcttttattacaatcattatgatgccattgtcttattctattgccactggtattgcatgtggatttattttttatccaataacaatgattatcactaaaaagtataaagaagttcatccaattatgtactttttaatggctttgtttatattatattttatattcgttcataaataa

SEQ ID NO: 8546 - DNA, 2136 bp, Staphylococcus epidermidis
atgaaatctttaatcttagctgaaaaaccatctgtcggaagagatatcgctaatgctttgaatcttcaacaaaaaagtaatggttatatagaagggaaacagtatatagtaacttgggcattggggcatcttgtgacaaatgcaacgcctgaacaatataacccttcatataaagaatggaatttagaagacttacctatcattcctaagaaaatgaaaacagtagtgattagtaaaacaaatagacaatttaaaattgtaaaatctttaattttagataaaaatgttaaagaaattattatagcaacagatgctggacgagaaggtgaactagtagctcgtcttattttagataaagtaggtaataaaaaaccaatcaagcgtttgtggattagttcggttacaaaaaaagccatacaagaaggatttaaacagttaaaaaatggaaacgcgtatcaaaatttatatgaagcagcacttgcacgaagtgaagcagattggatagtagggattaatgcaacacgtgcactaacgacaaaatatgatgcacaattatcattaggtcgtgtacaaactccaacaatacaaatagttaaatcaagacaagatgagattaactattttaaaccagaaaaatattacacgttatccattaatgttgatggttacgatttaaaccttaagcaacaaaagcgatataaagataaaaaagaattagaattgattgaacataaaattaaacatcaagaaggaaagatattagaagttaaaggaaaaaataagaaatcttacgcgcaacctttatttaatttaacagatttacaacaagaggcatataaacgttacaagatggggccaaaggagacactaaatacattacaacatttatatgagagacataagttagtaacctatccccgtacagattctaattatttaacagatgatatggtcgatacaattcaagaacggttaagagcaattttagctacagattataaatctcatgttcgagatttaatttctgagtccttttcttctaaaatgcatatttttaataatcaaaaagtttcagatcatcatgcgattattcccacagaggttagaccatctattgaacaattgagtcaacgagagtttaaaatttatatgctaatcgcagaaagatttttagaaaatttaatgaatccttatttatatgaagttttaacaatccatgcacaactgaaagattacaattttgttttaaaagagataatacctaaacaattaggatataaagctttaaaagatcaaacctcttcgcatactttaacgcattcttttaaagaaggtcagttatttaaagtacatcgtattgagattcatgaacatgaaacaaaggcaccggaatattttaacgaaggttcattacttaaagccatggagaatccacaaaatcatattgatttgaatgataaaaagtatgcaaaaacactcaaacattcgggggggattggaactgtagcaactagggctgatattatagaaaagttatttaacatgaatgctttagagtcgcgagatggcaaaattaaagttacatcaaaaggaaaacaaattttagaattgtctccaagtgaattaacctcacctatactaacagcccaatgggaagaaaaattaatgcttatcgaaaaggggaaatataattctcagaaattcatacaggaaatgaaaaactttacatttaaagtagtaaataaaattaaaagcagtgagcaaaaatataaacatgataatttaacaacaaccgagtgcccaacatgtggtaagtttatgataaaagtcaaaactaaaaatggacagatgcttgtatgtcaagatcccaaatgtaaaactaagaaaaatattcaacgcaagactaatgcacgttgccctaattgtaagaaaaaaatgactttattcggtaaagggaaagaagctgtttatagatgtgtatgtggccacacagaaactcaatcacaaatggacaaaagaatgagagataaaacgaatggtaaagtttcacgtaaagaaatgaaaaaatatataaataaaaaagaagaaatcgacaataatccattcaaagatgctctgaaaaatctcaaattgtag

SEQ ID NO: 8547 - DNA, 864 bp, Staphylococcus epidermidis; identical to SEQ ID NO: 4965

SEQ ID NO: 8548 - DNA, 792 bp, Staphylococcus epidermidis
gtgtttgaagaattagaaaataaagtggttcttattactggagctgccactggaattggcaaatctattgcggaaaattttggtaaagctaaggccaaggttgttataaattaccgttctgatcgacatcatgatgaaattgaggaaattaaacaaactgttgctaaatttggtggtcaaacattggtggttcaaggtgatgtttcaattgaagaagatattaaacgaatgattgaaacaacaattaatcactttggaactttagacattataattaataatgctggattcgaaaattcaatcccaactcatgaaatgtcgattgacgactggcaaaaagttattgacataaacttaactggcgcctttgtgggttcaagagaagccatcaatcaatttttaaaggaaaacaagaaaggtactattattaacatttcgagtgttcatgacactattccatggcctaattatgtacactatgccgcaagtaaaggtggcttaaaattaatgatggaaacaatgtcaatggaatatgcccaatacggtattcgtattaataatatatctcctggggcaattgttactgaacacactgaagaaaaattttctgacccaacgacgcgtgaagaaacaataaaaatgatacctgcacgtgaaattggaaatgctcaagatgtagctaatgcagtactattcctatcttcagatcttgcaagttatatacacggtacaacattgtacgttgatggtggcatgatgaactatccagcatttatgggtggtaaaggttaa

SEQ ID NO: 8549 - DNA, 909 bp, Staphylococcus epidermidis
gtgactgaacaatttgtcataattatattattaatagcacttggttattttcttaaacgtatgaattacttgaaagcaactgatagtcaagtactttcaactttagtgttaaatgttacattaccttcactcgttatagttaacttaaatagtgcaaaattagatgtatctttttcaatattacctataatgatgattatttacggtatagtagctaaaattattgtaatttggttctttagaaaatatgataaccatatgcgtggttctgttggtatgatgactggatctatgaatattggtttgtttgcttatccgttggttgaagcgatatggccatctaaaggtatgatatatttcggaatggttgatattggtggggccattatcatgtttggtattacttattttgtaggaagttattttagcgaaggtagtgaccaatttaacttcaaatttttaggaaaaaaattagttcaatcagtcccattagtaacctatatgattatgtttggattgaacatgtctcatattcatatatggcaaccagctattgatttctttagtgtattatcaaaggcgaatatgcctttatccatgatattattaggtgtaatgcttaattttagtattgagagagaatacctccctgtaacaattaaatatctttgtttacattacgggttaggtatgttagctggaacactagttcactttttattacctgtatctgatgatatgattaaaacaaccttgcttataacgtggttattaccagtaggagtagcaatcataccatattcgattcaattcaaatataagacattaccatttgttggaatggtaactaatttaaccattattattagcattatcattttgtatatttatcaagctgtatttgtataa

SEQ ID NO: 8550 - DNA, 171 bp, Staphylococcus epidermidis; identical to SEQ ID NO: 4968

SEQ ID NO: 8551 - DNA, 216 bp, Staphylococcus epidermidis; identical to SEQ ID NO: 4969

SEQ ID NO: 8552 - DNA, 3156 bp, Staphylococcus epidermidis
atgattaaaaaattattacaattttcgttaggtaataaattcgctatttttttgatggtagttttaattatattaggtggcgtttattcaagcgccaaattaaaacttgaattattaccagatgttgaaaatccagttatttcagttcaaactacaatgtctggagcaacaccccagtcaacacaagatgaaataagtagcaagattgataatcaagtacgctcgttggcctacgtaaatagtgtacagactgaatctatacctaatgcttctatagtaactgtagaatacgataatggtacagatatggataaagctgaagaacaattaaaaaaagaaatcgacaaaattaagtttaaagatggcgttggtgaacccgaattaacaaggaactctatggatgcttttccaattgtggcatattcttttacgagtaataatcaaaagttaaaagacgttactaaaaagttaaatcaacagctcgtaccaaaattacaaaccattgatggtgtacaaaatgcacaattaaacggtcaaactaatcgtgaagtatcgttaaagtttaaacaaaaaaatttagatgaaaaaggtttaactgcaaatgatgttgagaactatataaaaacggctacacgtgaaacgccattaggacttttccaatttaataagagtaataaatctattgttgttgatggtcaatttaaatctgtagacgcttttaaaaatcttaaaatccctttatctatttctggacaagctgcacaaaatgatagcgattccgacagtgatagtctaatgccaagtgataatactcgctcgactaatagttcaactcatatggcacagaaaggccaaatgccatctgtaccacttaaagatttagcagatattagtgtcggtgatgaacgtacttctatatccaagacaaatggaaaagatgctgttaacttacaaattatgaaatcacaagatgctaatactgtgcaagttgcgagagaagttcagaaaaaagtagatgaatttgtacgtaatgagagtggaatgaaatctattaaaacaatggatactgctaaacctattgaagactctctttatactatggttgaaaaggccgctctcggtacgattgttgctattatcgttattcttctgtttttaagaaatataagaactacagctatttcaattgtatctataccaatgtcaatattaattgcgctcatagcattaaaattaagcaacgtatcattaaatattcttactttaggtgcattaacggttgcaatcgggcgagttatagatgattctatagttgtcgttgagaatatatttagaagattatctgatccgaatgagaagctcaaaggtgaaaatttaattataagcgctactagagaagtatttaaacctattatgtcatcgacccttgttactatagtagtgtttttaccactagtgtttgtgtcaggttcagtaggcgaaatgtttagaccatttgcgctagccattacttttagtttattagcttcactacttgtttcgattaccctagtgccttctttaggtgcaacattttttaaaaatggcgttaaaaatagggaacaaaaagaaggtctaggaacagttgggagagcctatagaagcgctttgaattggtcacttaatcataaatggattgtgcttatagttagtatttttattttagttggaagtgtggtcataggcgcaagaaatctaggaacgagttatatttcaactggagataataaatttttagctctaacatatactccaaaacctggagaaacacagaaatctgtgacacaacatgctgaaaaagtacaaaattatttagataaaaaagataaagtagaaactgttcaatattctataggtggtcctacaccacaagatcctaccggtagtaccaacagcatggcaattatgattaaatatcaatctgacacgcctaattttgatgaagagcctgataaagtacttaaacatatcgagacatttaaacaacctggagaatggaaaaatcaagatttaggaacaggagcaggtaataattctgttgaagtaactgtcaaaggacctaatacaagtgcaatgaaagatacagtcaaccgtgtagagaaaatgatgactgatattaaaggcataacgaatgttaaatctgatttatcacagacgtatgaccaatatgaaataaaagttgaccaaaataaagctgcagataatggtatttctgctgcacaacttgcgatgaatcttaatgaaaacttacctgagaaaacaatttctacagttaatgaaaagggtaaatctatagatgtaaaggtcaaacaaaataagcaaacagattggtcttctcaaaaaattaaaaacattaaactaaataagcctacgggcggtacgattaaacttagtgaaatagcatctcttaaaaaatcatatacaccaagtaaactgactcaagaagatggcgattatgctacgactgttacaggtaaagtgactgataaagatgtgggtggtaaatctcaacaagttatggctaaagtgaaagaccttgagaaacctagtcatattaaaattaatgtcggcggtgcaactgatgacattgataaggctatttctcagcttgctatggcgatgatagcagcaattatcattgtttatttaattttagttattacatttagaggtggtctggcaccatttacaatcttgttctcattaccatttacggttatcggtgtagtacttgcactcatcattaccggagaaactatttcagttccaagtttaataggtatgcttatgttaattggtatcgttgttacgaatgctatagtattaatcgatcgtgttattaacaatgaaaaacaaggtatgccgatgaaacaggcattgatagaagcgggtggtacacggataagacctatattaatgacagcaattgcaacaataggtgcactagtgccgttgttatttggtcatgacagttcaatattaatttcaaaaggtatggctgcaacagtaataggtggattaatttcttcaacgctactcacactctttgtagtaccggttatatacgaaattttattcactttaaaaaataaaattactaaaaagtttaatatgtaa

SEQ ID NO: 8553 - DNA, 1251 bp, Staphylococcus epidermidis
atggaaaagatgaacatcactaatcaacaacatgacgcatttgtgaaatctcatcccaatggtgatttattacaattatctaagtgggcagatacgaaaaaattaacaggatggtattcaagaagaattgctgtcggtgaaaatggtcaaattaaaggtgttggccagctactattcaaaaaaatacctaaacttccatacactttatgctatgtatctaggggatttgtagctgattataataataaagaagtgttagaagctctacttagctatgctaaagaagtagcaaaagatgaaaagtcgtatgctatcaaaatagatcccgatgtcgaagtagataaaggtgcagaagcacttaaaaatctacgtgagcttgggtttaaacataaaggttttaaagaaggactgtctaaagactatattcaaccaagaatgactatgattacgcctattgacaaaacagatgatgaattagttcaaagtttcgaacgtcgaaatcgttcaaaagtaagacttgcactgaagcgtggaactaaagtagaacgatcaaatcgcgaggggcttaaaatctttgctaatttaatgaagataactggggagagagatggttttttaactcgagatattagttattttgaaaatatatatgatgcacttcatgaagacggtgatgcagaactcttccttgttaaattagagcctaagccagtattagatacggttaatcaagatcttgaagcacaattagctgagaaagagaaattacaatcaaaaaagcaagataaaaagacacttaataaacttaatgatattgataataaaattaagaaaacaaatgaattaaaatcggatttaacagaacttgaaaaaagcgagccagaaggtatttacttgtcaggagcgctcttaatgtttgcaggaaacaaatcttactatctctatggcgcttcctcgaatgactatcgtgatttcttaccaaaccatcacatgcaatttgaaatgatgaaatatgcacgtgagcatggtgcaacaacctatgactttggtggtacagataatgatcctgataaagattcagaacattatgggttgtgggcttttaaacgagtttggggtacatatttaagtggaaaaattggagaatttgattatgtattaaatcaaccgctatatcatttagttgagaaagtgaaacctcgtttaacgaaagctaaaattaaaatatcacgtaaacttaaaggtaaataa

SEQ ID NO: 8554 - DNA, 762 bp, Staphylococcus epidermidis
ttgaacttaaaattagaccatatcattcactatttacatcaattagagtcatttaagtttcccggagaaatattagaattgcaaaatggtggaagacatcatcatttgggcacctttaatcaaatagcaccgattaaaaatagttatatcgaattgctagatgttgaaaatgagtcaaaacttagcaatatagctaaaactgaagaaggtcgtgtatcatttgctacaaaaatagtgcaggatcattttaaacaagggtttaaaggtatttgttttagaacaaaggatataaatcaggttaaaagtactttagaaaatagaggcgttgatgtgataggtcctattgatatggaaagagaaaataaaaaaggtcatcaaattcgttggagattgctatatattgctaaccctgactatacagtcaaaccacctttctttatagaatgggataacaacaaaaagcaaaacctatcacaaatacataatttcaacttgtcatcgtttaaaattaaagaggtgattattactagcactcaacgtgaaacaacagtaagtctttggaaagaatggtataacctgaaaatagtaaatgaaacggctacatctactgatttcaaattagaaactgatgaagttatctataaaatagaagacggcaaagattcaggttttcatacattaataatgaccgatatcaatgccacagcaccatattcaatatttatacgtggtgctaaatatcgttttgagccacccaactag

SEQ ID NO: 8555 - DNA, 441 bp, Staphylococcus epidermidis
gtgttagatattttaaccaatgaatttttcaatagttttataggtatatatagaccctatattaaacttacacaacctatattagatcagcatcagattcatactggccaatggcttgtgctaagagatattgccaattatcaacctactacccttgtaaaaatttctcatcgtcgttcaatagaaaagcctacaacacgaaagttgattaaagtgttgttagacaatggttgggtcatgacaaaaacaggagttgataagagagagaaattattgagtttaactgacaaaggccaaagactttttgaaactattaataaaaagatcactgtcattcaacaagatattataaaaaaaactggattaactgatgagcaagtatttgatattacaaatgcgatgtctcaaattcatcaagcaatgataaaggaggaacagtaa

SEQ ID NO: 8556 - DNA, 1194 bp, Staphylococcus epidermidis
atgaatcagtctacaataattaaagaccccatctttacgaagagttttaatattaactttgctattaacttttttgtttatctatgtatgtatttattaattgtcgttatcgcgagctatagtaaatcagaataccatgcttctgattctgttgctggactcgtagtcggactttttatagtaggatcattaataggtcgatttgtaacaggtaaatacgtcaatcgatttggtccaaaaaaaattctcatttttggtttaatatgtttagtagtaacacagctactttattttatacctggttctgtttggttcttaatgatggtgcgtttactgaacggcttagcaacagcggttgctacaactgctacaggaacaatagcagcatatattacaccacctacacgcaaaagtgaaggtatcagtttattctcattaagtttggtgttgggaaccgctattggcccattttttggtatgttattgatgaattccttttctatcaatattttatttactatttgtgtaattttaggtgtcataagtggtctattatcactgttaattaaaattaatttcacaacagttaaagaaaacacaattacacataaacgattcaatttggctcattttgtagccaaagaagccattccggtagcattcgtcatgctattaatcggtgttacttacgctgcaattttaacttatttacaggcttttgctgttgaaagagatctagttacatcagcaagttactttttcattttttatgctattgcgtccctcataacaagacctattgctggaagattgatggatgataaaaacgaaaatgtagttgtttatccagcatttatctttttagtattatcttttgttctactgatgcttagttttaacggatgggtattacttattgcaggtatcgcattaggaattggttatggtaacttgtcatcttgtatgcaagctatcgcaataaaagtatctccatcaaataaatatggcttagctacatcaacttactttattggtttagatataggaattggatttggaccatccttactaggtcttttcacacatatgatttcttatagtcaattatatggaatcatgggtattttaggatttacaactttagtcatctatattttagtgcacggacgtaaggtttacagcacttcatattaa

SEQ ID NO: 8557 - DNA, 324 bp, Staphylococcus epidermidis
atggactatataactaagaacatcaacagttttactaagagacttgcagaggctatcaatggtagacaaataaacgcactaaaaagcaacccatctagcaaaaagataacttggaactggggaggtactttctaccctaacgcacctaaaagtggtattagagttagaaggtcgctaggtatcaatggcgctattgttgaaagtggctcgttatacagaaagacagattgggttaaattcgaccaagttattaaaaaagatggatattggtggcaccactttaaatatcaagcaccaggttcaagtaataaacatttctattga

SEQ ID NO: 8558 - DNA, 735 bp, Staphylococcus epidermidis; identical to SEQ ID NO: 2771

SEQ ID NO: 8559 - DNA, 156 bp, Staphylococcus epidermidis
atgacaaaatcagctaataaaatcatttcaattgctataaaagatatgaaacatatacaaaatgttttaaacagactattacagatttctgccaaaataaaaaacataccttttagtaaaatggttaaaattttgatatcgacatctacgaaatga

SEQ ID NO: 8560 - DNA, 288 bp, Staphylococcus epidermidis
atgcaacttaaatacaatgaaataaataagaaccaactcatttcgtctgaaacaccgtttctagaaaactttcaagattgtataaaaattaataaaaagaacaaaatatcacaatcaactttaaactgttattataatgcattaaatatctttgatgaaaagtttggcaatacagctattaaaaatttttcacaacttaaatatagcgaaatgttaaaagagtatgcagaaggtcacattattggtggacataaaaaagacatacgaaagcaagtgttcaaaaattaa

SEQ ID NO: 8561 - DNA, 666 bp, Staphylococcus epidermidis
atgcaacaagaaacgacatcatggtacaaacaagaatggtttatagttttatcacttttattcatttttccactaggtttatttctcatgtggaaatttagcaagtggccatctattgcaagaacaatcattactgttgcaatttcagttatcgtattagcaagcattacctattatggtaatctacaaatgattgtaccagcaacatcaaattcaaataacgaaactaaagaaactacagagaataatgtaaatgataaagacgagcgaaatcataaaactgcagtagaagaaacaaaaactaattatgactccaccaaagaaaatactaaagaacctggaaaagaaaatgaatctgcaacacgattggagaactctgcgcttgaaaaggcaaagtcatattatgatgattttcacatgtctaaactaggaatttatgatattttaacatctgaatatggagaaaaatttgataaagaagatgcacaatatgctatagatcatctagaggctgattatgaaaagaatgcacttgagaaagcaaaatcatatgccaaagatatgcatatgtctaatgactcaatttacgatcttttggtgtctaactacggtgaaaaatttacagaatcagaagcaaaatatgctattgagcatttggataattaa

SEQ ID NO: 8562 - DNA, 147 bp, Staphylococcus epidermidis
atgtactatgtgaaaagtaatttaactaacgcactaatctctttaaatcaaattgaaaaagcaatcaacgctcacgattgcaaaacacttcaagacttgagtaattactttaacttacctactacacatttatttctaacaatgtga

SEQ ID NO: 8563 - DNA, 1425 bp, Staphylococcus epidermidis
gtgaatttttggttacaggaacaagctcaatcaaatggaaatcgattagcgattgttacaaatcagttatctttaacgtacgaagaattatatcatcgtgcaaaaacaatcgcggaatatttaacttctttaaatcagaaaaggattggtttatatataagcaatgatattgattcagttgttttgattcatgcttgttggttagctcatattgaaatagctatgataaatacacgtttaacgcgacatgagatgataaatcaaatgaattcagtcgacatagcaacgattgtacacacgttgcctttagaattagaagggtttaatttatatcattttaatgatttaacacaattagataaatatgatgtttcaagttacaaatttaatttagaatcgattgcatcaattatgtttacgtctggaacgacgggacctcaaaaagctgtgcctcaaacgtttaataatcatttagccagtgctaaaggctgtaaacaaagtttaggattcgaacaaaatactgtgtggctttcggtcttacctatatatcatatttctgggctcagtgttattttgcgcgcagtgatagaaggattcactgtcagacttgttaaaaagtttcaaactgatgatatgttaacacaaataaagacttatccaatcacccatatgtcccttgttccacaaacgttaaagtggttaatggatgcaggattgactcaaccattttctttagaaaaaattctgctaggtggtgctaaattatcaccacaattaattgagcaagcattgacttatcgtttacctgtatataattcttttggtatgacagaaacttgctctcagtttctaacagcctcacctcaaatgctcaaagaacgtttcgatactgttggaaaaccaagtgaaaatgtcgaagtgaaaataaaaaatcccaacgcatatggacatggagagttattaattaaaggtgaaaatgtgatgaagggttatttatatcccaaatatttaaaagacacatttgataatgatgggtattttcaaactggagatatagctgaaatagatgatgaaggttacgtcataatatatgatcggcgcaaagatttgattataagtggtggggagaatatttatccttaccaaattgaaacaatcgcaaaagactttgaaggcattgaagatgccgtatgtgtaggaatatcagatgatacttggggtcaagtaccaatattatattatgtgacaaatcaagatattaatcaaaatgaattaatagaacattttgagaatcatttagctagatataaaattcctaaaaaatattatcaggtcaaatctttaccttatacatcgacaggtaaattacaacgtaaaaaggtcaaaagtgaagacttgaatgagggaaagaataatgaaagttaa

SEQ ID NO: 8564 - DNA, 1002 bp, Staphylococcus epidermidis
atgaaagttaaggcaatcaatctatatacttataaggaaccttttaaatcaccaatttcaacaccgaaagtgaagttaacgcatcgagaaagtttgtttacggaaatagtaacttatagtggagaaacttattatggagagtgtaatgcatttttaactaattggtatgataaagaaacaatactcacagtcgtaaacagattaagacagtggataccgcaagtacttcataaagatatgacatcttttgattcatggttaccttacctaaatcaaatgaatgatgcgccagctgctagatcaatggttgtcatggctgtttatcaaatgtataacgacttgcatgattttgaagtacaatacggtgctacagttagtggcttaactaatagtcaaattgaaacattattagaaacaagaccgaaacgtataaaacttaaatggtcaacatcactcatcaaagatcttgaaactatacgtttattaaattttgattgtgatattgctatagatgcaaatgaatcattaacaaagccatcatttttacaattagccaacgtaaatacatcagatattatatatattgaagaaccttttaaaattctagaagatttaaatgatattgatatgtctatttttcctagaattgccatcgatgaaaaggcactttctatagaaaaaatacaatcaataattcagcaatatcccatacaagtcgtcgtgttaaaaccatttagacttgggggaatagatagaatgttaaacgccatgaaaattttgaaagaaaaaaatataaggtttgtagttgggggcatgtatgagtttggtctaagtagatattttacagcaatgttagctaaagaaggaagttatccgggtgatattacgccacacggttattatttttctaacgatatcgtagagacaagtggcatattaaaagggggaatgatttatttcactccccctaaagtcaaacgttctttacttaacaaagtttaa

SEQ ID NO: 8565 - DNA, 252 bp, Staphylococcus epidermidis; identical to SEQ ID NO: 6421

SEQ ID NO: 8566 - DNA, 477 bp, Staphylococcus epidermidis
gtgaggaacgtggagtttgaggataaagatggaaggattgtaacattgaactataaaaatgaaaatgatatgcctaatggcaatcacgttcttgcaattcctgtatacaataatcagttattatttacaaaccatcaacatcgtgggatagagtttcctggtggtaaagttgaaataagcgaacaaagtaaagaagcagtaattagagaactatacgaagagacgggggcaatcgcaaaatttatctattattttgcacagtatagtataaaaatggggcatgatgagccgtttataaaggacgtttacttcgttgaagtaagtcatttggaatatgtagatacctattacgagactttaggcccttgtctttatcatcaaattaatgatattcctttaaataaaagaagttttttaatcaatgataaggcgattcttcattgtttggaaagggtgaaaacacttggattttattaa

SEQ ID NO: 8567 - DNA, 762 bp, Staphylococcus epidermidis
atgccaatcgaatatgaaactcatttttttaatgaagtaacatatcttgtagattatttaaaagtcaaggctctgatgatgattccgaaaaataaaaaagatatcaaacgtatcgttatatacttaagaggtggtaaagggcaagttggaagagtgagagctgcaagacttatgcaatttgcaaatgaatatactttagttataggtccatactatagaggaaataatggaagtgaaggaagagatgaattttaccgcggtgatttaaatgatgtaacgcatttgattcgacttttaaatcaaaactatccttctgcatttatacatatggtaggattttcacgtggaggtctacaaggattacttacttttaatgatttgcctgtagatagttatatgatttggggtggcgtatctgatatacatttaatgtatgaagaacgagttgacttgagaggtatgctacgacgaatggttggacatccaaaaaaagatgcgaaagcttataaaagcagagatgcaatgcaatttataaaaaaagatagtcctcctattctcattattcatggtggcaaagatattcaagttggaatacatcaatcttatgatttagaaaaaaaattaaaatccaaaggaatttattatcaaacctattatcaattggatgaaggtcatgtaccacgacctcctgcgatgagagacgtaattcgatatatacatcaatggatgaacgacgtcgaaaataaaaatttaaatatatag

SEQ ID NO: 8568 - DNA, 1593 bp, Staphylococcus epidermidis
atgtctatagatacatacacagaaacacttaagataaatcagctaatagaaaaagctacatcacattttcaactatcatcaacacaattatacaaaaaaattttaaaaaatcatgagggtgagttaactgaactgggggcaataaatgttaaaacaggtaagtacactggtcgttcacctaaagataaatttatagtcactgaaccatcgtataaggataatataaattggggagatatcaatcagcccatggatgaagaaacatttctaaaactttacaataaagtactcgattatttaaatcagaaagaggaactttacatatttagtggatatgcagggagcgataaagagtcacgtcttaaacttaaggtgataaatgaattagcttggcataatttatttgctcgtaacatgtttattcgtccagaatctatagatgaagctcaaaatataaaacccaacttcacaattgtttcagcacctcactttaaagctaatcccaaattagatgggacacatagtgaaacatttgtcattatatcttttaaacataaagtgattttaattggtggcacagaatatgctggtgaaatgaaaaaaggtattttctctgtaatgaactatttgcttccaatgcaggatatcatgagtatgcattgttcagctaatgttggagaaaaaggagatgtagcactattctttggattatcaggaactggtaagacgacgctttctgccgatccaaaacgtaagttaattggtgacgatgaacatggttggaataaaaatggcgtttttaatattgagggtggatgttatgcaaaagcaattcatttatctaaacagaaagagcctcaaatttataatgctattaaatacggaacaatattagaaaacacagttacaaatgatgacggtacggtagattttgatgataacacctatactgaaaacactcgcgccgcctaccctattgactatatagagaatattgttacaccttcaaaggcagcacatccgaatacgattattttcttaaccgctgatgcatttggagttatccctcctatttctaagctaactaaagatcaagcaatgtatcatttcttaagtggattcacgtctaaactagctggaacagaacgtggtgttactgaacctcaaccttcgttttcaacttgctttggtgcaccattcttacctttaagtccaacaaagtacgctgatttacttggaaatttaatcgatattcatgatgtagatgtatatctagtaaatactggatggacaggtggtaaatatggtatagggcgaagaattagtttacactatactcgtgaaatggtagatcaagctatatcaggtaaattaaaaaatactaaatatattaaagatgatacatttggcttaaatattccagttcagattgacagtatacctacaactattctgaatcctatcaatgcttggaacaataaagataactacaaagcacaagcttacgatttgattcaacgctttaataataactttaaaaaattcggcaaggaagttgaacatattgccaacaaaggtgcatttaatcaataa

SEQ ID NO: 8569 - DNA, 1200 bp, Staphylococcus epidermidis
atgacatacaataaacgattatttacctcagaatcagttactgaaggccatcctgataaaattgctgaccaagtttcagatgccattcttgatgaaatattaaaggatgatcccaatgctcgtgtagcatgtgaaacaacagtaacaacaggaatggcacttatttctggagaaatctcaacaactacttatgtagatattcctaaagtggtgagagaaacgattaaagatattggttatactagagcaaaatatggttatgattcacaaacaatggcagtgttaactgcgattgatgaacagtctcctgatattgcacagggtgtagacaaagctcttgagtatcgaaatgatatttctgaagaagaaattgaagcaacaggtgcaggtgaccaaggattaatgtttggatatgcaactgatgaaactgatacgtatatgcctctacctatattcctgtcgcatcaacttgctaaacgattggctgatgtacgaaaagatgaaattttagattatcttcgtccagatggaaaagtacaggtgactgttgaatatggtgaagatgacaaacctagacgtattgataccattgtagtttctacacaacatgctgaagatgtagagttagcacaaattgaaaaagacattaaaacgcatgttatttacccaactgtagataaagctttattagatgatgaaactaaattttacattaacccgactggacgtttcgttattggaggacctcaaggagatgctggtttaactggacgtaaaattatagttgatacgtatggtggttatgcccgtcatggtggaggttgttttagtggtaaagatcctactaaagtagatcgttcagcagcttatgcagcaagatatgtagctaaaaatattgttgcagctggtttagctaaacaatgtgaagtacaacttgcatatgcaattggtgtagcagaacccgtttccatttcaattaatacgtttgatactggaaaggtttcagaagcacgtttagttgaagctgtaagaaagcattttgatttaagaccagcaggtatcattaaaatgttagacttaaaacaaccgatatatagacaaacagcagcgtatggtcattttggacgtacagacgtattgttaccatgggaaaaattagataaagtcaatgttttaaaagatgctgttgaaattcaatga

SEQ ID NO: 8570 - DNA, 909 bp, Staphylococcus epidermidis
atggatttttcttcaccgacagtaattggcttaattgttgcaatacttgtggctgttttattctttatactcttcttaatagcgaaccatagtaagaagaaagtgaagaatcaaacagaagcacattataaagaaaaagaacaacatctaaaagaatctcatgaagaagctttagaaaaagagagagttgagaataaaaaagttgttacaaaacaaaaagaagattttgacgtgacagttagtaacaaaaatcgtgaaattgatgcgttgaaactattctcaaaaaatcatagtgaatatgttacagatatgcgattaattggtattcgtgagagactagtaaatgaaaagagaatacgccctgaagatatgcatattatggcaaatattttcttgcctagtaatgagttaactaatattgaacgtgtgagtcatcttgtacttacacgaactggcttatatataattgattctcaattattaaaaggccatgtttataatggtattagtggtgcgcaatttaaagaattacctacgatgtcacaagtttttgacacgctcgacttagattcatcacagccacagacattggtcttagatcaaaatgaagatcaacattcattatcttttgttaattattcagataagattaaacatattgaaaaattagcaggagatttacaaaatgaattgaataccaaatatacgcctacatcaatactgtattttaatcctaaaaaggataatgatgttacaatttctcattatacgcagtcatcaaatgttaaagttttagttggtcctgaacaattagatgaattcttcaacaagtttgttttccatggacgcatacagtacaatgtggatgatttacaagatatcatggttaaaatcgagtcattcaattaa

SEQ ID NO: 8571 - DNA, 837 bp, Staphylococcus epidermidis
atggagacggttcaattttataacggaagaacaatgccgaaaatagggctcggaacttatagagtaaaagatggcgatgaatgtagagaatctgtaaaatatgctatcgaacggggttatagaagtatagatacggcaatgatttatggtaacgaagaaacggtaggtcaaggtattaaagaaggattagaatcgactggtttaagtcgtgaagatttatttataacttctaaattatggctaactgattttggacgtcaaaatgtggaagatgcctatcgacaatctgttgcaaaattaggactggattatttagatttatatctgatgcattggccaggtacaaatgaagcggtaatgattgatacttggagaggtatggaagacttgtataaacaaaatcaggtgaaaaatattggtgtgagcaattttactccagaacattttgaagcattgcttgcccaagtttctattaaaccggtcattaaccaagtagaatttcatccttatttaacacaaaataaattacgaaagtatttagaagctcaaaatattatcatggaatcatggtctccattaatgaattcacaaattctccatgatgaagtcataaatgaagtagctaatgaagtaggaaaaactccagcccaagttgtaataagatggaatattcagcacgatgttgttgttatacctaaatccgtaacaccacatcgcatagaagaaaatttagacgtatggaattttgaattaagcgacaaccaaatggaaagaatcgatcaattaaatcaagataaaagaattggacctaaccctcttgaatttgacggtaagtaa

SEQ ID NO: 8572 - DNA, 1509 bp, Staphylococcus epidermidis; identical to SEQ ID NO: 4157

SEQ ID NO: 8573 - DNA, 1320 bp, Staphylococcus epidermidis; identical to SEQ ID NO: 4158

SEQ ID NO: 8574 - DNA, 504 bp, Staphylococcus epidermidis
atgaatacaatcaaaagtacgatacacacagaagcgatatttagcgatgatgaacaacaccgctacttactcaagaaaacatgggatgaaaagaaagctgcatgcacagtgataacgatgtatcctcatttagatggtgtattatcactcgatctcacaactgttctcatcctcaaccaattagcaaactttaaacaatatggcgctgtatatctagtgaatctattctctaatatcaaaaccccagaaaacctcaaacatatcaaagagccttttgataaacatacagacattcacttgatgaaagcgattagtgagagcgagactgtcattctagcctatggtgcctatgcgaagcgtcctatagttgttgaacgtgtggcacaagtaatggaaatgttaaaacctcataaaaagaaagtcaaaaaactcataaacccagcaacaaatgaaattatgcacccactcaatcctaaagcacgtcaaaaatggatattgaaataa

SEQ ID NO: 8575 - DNA, 312 bp, Staphylococcus epidermidis
atgaaaatcaatcgatacatcacaagaggcattagtgaacaactatctctagaccttcaaatcttactttggaacatggtaaaagatcgagacaatcaacttaatacagattacctacacattttcaaactacaagaagatgataatatgttgtcaattacacatgaacaagaacaacccgcatacaaattggaatatcactatacaaactatataaaaaatcaaaatgcattacctaagaaagtctacgtcatccgagaagatgatgtagacgctttttattatgtgatgctttttccagaagaatactaa

SEQ ID NO: 8576 - DNA, 351 bp, Staphylococcus epidermidis
atgaaaaccatcactcaagaactcaaacaatatatgacccacctattccaactatctaataacgaagcttgggaatgtgaagcgctggaggaagcagcagaaaatattctaccggaacgttttattaatgattctccactggtacaactcacactcgagacttatacctactataatgatgagctacatgagctaagtatctatccatttctaatgtatgccaataaccaactcatcagtattggttatctggatcattttgatatggactttctgtaccttacagatactcaaaatatcattattgatgaacgtcatttactaaaacaaggaggtcaggaccatgaataa

SEQ ID NO: 8577 - DNA, 783 bp, Staphylococcus epidermidis
ttgatactcgaagtattaaacatacctaaatcaacatattaccgatggaaaaacaaaacccataaaaatgataccgtaacacaaaaagtcattgaattatgtaaagctaaccactatacctacggttatcgtaagattacagcattgattaatcaatgttatacatcaccaattaatcataagagagtacagagaataatgcagaagcatcatttaaactgccgagttagacctaaaaagacgacaagaataggtaaaccgtattataaaacggacaatttattacaaagacaatttaaagcgagttgtccaatggaagtattaacaaccgatattacttatttaccatttggtcattctatgttgtatttatcttcgataatggatatttataacggagaaattgtggcgtataaaatagatgataaacaagaccaaagtttagttaatgatacattaaatcaaatcgatatacctgagagttgtatattacatagtgatcaaggcagcgtttatacatcttatgcttattatcaattgtgcgaagaaaaaggcattatcagaagtatgtcccgaaagggaacacctgccgataacgccccgatagaaagtttccattcctcgctaaagtctgaaactttttacatcaataatgagcttaatcgctctaatcatattgtaatagatattgtcgaaaagtacattaaaaactataataataatcgaattcaacaaaaactaggctacttatcctctgtaaaatacagagaattaatagcctag

SEQ ID NO: 8578 - DNA, 930 bp, Staphylococcus epidermidis
atgtctaaaatcgtcgtagctttgggtggtaacgctttaggacaatcgcctaaagaacaattagatttattaaaaagtacatctaaatctctagtaagtttaatcgataaaggatacgaaattgtaattagtcatggtaatggtccacaagtgggaagtattaacttaggtttaaattatgcggcggaacacaaacaaggtcctccttttcctttccctgaatgtggtgctatgagtcaagcttatattggctatcagatgcaagaaagtttacaaaacgaacttcattcaatgggcatagataaagaagttgttacgctagtaacacaagttcaagttgcaagcgatgattctgctttcaataaccctactaaaccaattggattattttatacaaaagagcaggctgataaatttacgaaagaaaaaggttatacttttgtagaagattctggacgcggctatcgtcgcgttgtcccttccccacaacctataagtatagttgagttagatagtatagaaacattaatcactcatggaacactagttatcgctgccggcggtggtggaattccagtaattaaggaaaatgaagtttatacaggtgttgatgcagttattgataaagataaaacgagtgctttattagcagcacatttacaatctgatcaattaatcatattaactgctgtggaccatgtttacattaactatggaaaagaaaaccaaagaggtctcgatgaagtgtctgtggatgaaatgaaaaaacatatctctgatggtcaatttgctaaaggaagtatgctcccaaaagttgaagctgcacttcaatttcttgaaaaaaatactaaaggcagtgttttgattacatctctagcaggattaggggacgctttagacggtaaaataggaacattaattaagaattga

SEQ ID NO: 8579 - DNA, 999 bp, Staphylococcus epidermidis; identical to SEQ ID NO: 6762

SEQ ID NO: 8580 - DNA, 690 bp, Staphylococcus epidermidis
atgtatgaagaaaatatttatattaaaaattcagaatatgaatttgataataatcttaaacaattagcatcatacttaaatattcctgttagtattgttagaccttataaagaggatttaacactttatcaatataaaaaaggacaagtcatatatcattcaactgatcaaataaaatttgtatactttttagtaaatggttgtattttacatgaatcttctaatattactggtgacaattatttaagattaagtaaagacgaaaatatatttccaatgaacttcatatttaatgaaacccctgcaccatatgaaatatgtacagctttgacagattgtaaaatattaactttaccgaaagatttacttgagtatttatgtagaaagcataatgaaatatttgaaagtctcttcaagaaacttaatgagactattcaatttcaagtagaatatattatggcgttaagagctaattcagctaaagaaagaattgaaagaatactacaaattttatgcctttcaattggggatgataatggagaattctatgaattaaaacaaattatgactgttcaattaataagtaatttatctggacttaacagaaaaactactggtgaaataatcagagaattaaaaatagaaaatattatatatcaagataaaagaaattggattataaaaaaataa

SEQ ID NO: 8581 - DNA, 1422 bp, Staphylococcus epidermidis
atggatgaaaataaattaggtaaaacttccttaattggtttagtcataggctctatgataggcggtggtgcattcaatatcatctcagatatgggtggccaagctggtggacttgcaataattatcggttggataataactgctattggtatgatttctcttgctttcgtatttcaaaatttaacaaatgagcgaccagatcttgatggaggaatttatagttatgctcaaacagggtttggagattttattggtttttcaagtgcttggggatattggtttgcagcatttctaggtaatgtggcttatgcaaccctattaatgtcagctgtgggtaactttttccctatatttaaaggaggtaacacacttccaagtattatcatagcatcaattttattatggggtgtacattttttaatacttagaggtgtagaaactgcagcgtttataaatagtattgttacagtagctaaattaatacctatatttctagttattatatgcatgatagttgtattcaacttcagtacttttaaatccggtttttatggtatgactagtggaagtgttggcgtttttagttggggagatacaatggcacaagtaaaaagtactatgttagtaactgtatgggtattcacagggattgaaggagccgttgtcttttctggacgtgcaaagtctaaaaaagatgtaggaactgctaccgttattggtttgatttctgtgctagtcatttatttcttaatgactgtactagcccaaggtgtcattcagcagaaccaaatttcaaaacttgctaatccatcaatggcacaagtattagaacatattgtaggtcattggggttcagtgttagttaatataggcttaattatctctgttttaggagcttggttaggatggacattactagctggtgaattaccattcattgtagctaaagatggacttttcccgaaatggtttgctaaagaaaataagaataaagctccggtcaacgctttaattattactaatatattagttcagttatttttaattagtatgttgtttacagatagtgcctatcagtttgcgttttcacttgcatcaagtgcaatcttaattccatatacactcagtgctttttaccaggttaaatatactattcaaaataaatctaaagctaatttaaaacaatggataataggaattattgcatctatttacacaatttggttggtttatgcagctggattagattatttactattaacgatgttgttatatatacctggattactcgtatacagctacgtacaaagggataataacaaacatttgacaaaattggattatacgttattcatattcatcattgtacttgcaataataggaatagttcgtttgattacaggtaatatttctgtattttaa

SEQ ID NO: 8582 - DNA, 1236 bp, Staphylococcus epidermidis; identical to SEQ ID NO: 6747

SEQ ID NO: 8583 - DNA, 447 bp, Staphylococcus epidermidis
atgaaaaaagaaaaacgtttaaatcttatcttaactgttatacaacagaatcagtttaataaaaaacaacaaatagtggattacatggcaagacattttggagtttactatagcttgacaactatttctcgtgacttacaagaattagaaatttacaaaatccctgttgaaaataaaaagtatatttacaagaaaataaatcaaacaaatcaattaagtgcaaaaaaacaattagaaatatttagtgatgagattattgaatttataacgctaaataactatgtcttaataaaaacatctcctggctttgctcaaagtataagttattacatagatcaattacaaatgaaagaaatattaggaactattggaggtaacgatactttgatgattttgacttcttcaaatgaaatagcagaatttgtttgttatcaattattcccttaa

SEQ ID NO: 8584 - DNA, 156 bp, Staphylococcus epidermidis
atgactgtagattgtgataagaaatcaagtagtagagttaataagaggagatcagtaaaaagattattgaagaaatacggatatccatctgacttagaaacaatagcaatcaatcaagtggttgaacaagcagagatgatggctagtaatcagtaa

SEQ ID NO: 8585 - DNA, 2067 bp, Staphylococcus epidermidis
gtgaagacaagacaaaacaaatacagtattcgtaaatttagcgtaggtgcatcatccattctgattgcagcattattatttatgggtggaggatcagctcaggcagctgagcaacaacaggataagggaactgttgaaaatagcacaacacaatctattggggatggaaatgaaaagttaagtgaacaacaatcaacgcaaaataagaatgttaatgagaaaagtaatgttaattctattactgaaaatgaaagcttacataacgaaacaccaaaaaacgaggatttgattcagcaacaaaaagattctcaaaatgacaataaatctgaatctgtagttgaacaaaataaagaaaatgaagcatttgttcaaaatcattccgaagagaaaccacaacaagaacaagttgaactggaaaagcatgctagtgaaaacaatcaaactttacactcaaaagcagcacagtccaatgaagatgtgaaaactaaaccttcacaactcgataatacagctgccaaacaagaagactctcaaaaagagaatttgagtaaacaagatacacaatcatctaaaactactgatttactacgagtaacagctcaaaatcaatcaaaagatagccaatcaacagaagagataaataaagaagtaaataacgacactcaacaagtgactgctaagaacgatgacgccaaagttgaatcatttaatttaaatagtaaagaggaaccccttaaagttgacaagcaagcgaatccaactacagataaagataaatcttctaaaaatgataaagggtctcaagatggtctcgctaatttagaaagtaatgctgttgctacaactaataaacagtctaagcaacaagtgagtgaaaaaaatgaggatcaaacaaataaatcagcaaaacaaaaacaatataaaaataatgatccaattattttagtacatggtttcaatggatttacagacgatatcaacccatcagtgctaacgcattattggggtggcgataaaatgaatattcgccaagatttggaagaaaatggatatgaggcttatgaagcaagtataagtgcatttggtagtaactatgaccgtgctgttgagttatactactacatcaaaggtggacgtgttgactatggtgcagcacacgcagctaaatatggtcatgagcgttacggtaaaacctatgaaggtgtttataaagattggaaaccaggtcaaaaaatacatttagttggtcatagtatgggtggtcaaacaattcgtcaattagaagagctattgagacatggtaatccagaagaagttgaatatcaaaaacaacatggtggggaaatttctccattataccaaggtggccacgacaatatggtgtcatctattacaacactcggtacaccacataatggtacacatgcgtcagacttattaggtaacgaagcgattgtacgccaacttgcatatgacgtaggtaaaatgtatggtaataaagattcacgtgtagactttgggttagaacactggggattaaaacaaaaaccaaacgaatcatatattcaatatgttaaacgtgttcaaaattcaaaactgtggaaatcaaaagatagtggtttacacgatttaacacgcgatggcgcaacagatttaaaccgaaaaacatcattaaatcctaatattgtatataaaacttatactggcgagtcaacacataaaacattggcaggaaaacaaaaagctgatcttaacatgttcttaccatttacaattactggtaatttaattggaaaagctaaagagaaagaatggagagaaaatgatggacttgtttcagtcatttcttcacaacatccatttaatcaaaaatatgttgaagctacagataaaaatcaaaaaggtgtatggcaagtaactccaacaaaacatgactgggatcatgtagactttgtaggccaagacagtacagatacaaaacgtactagagatgaattgcaacagttctggcatggtcttgctgaagatttagtacaaagtgaacaattaacatcaacaaataaataa

SEQ ID NO: 8586 - DNA, 786 bp, Staphylococcus epidermidis
atggatatacaaaaatttgaatcttatctaaaaattaaacattcatactattcgactccttctcttgaagcattaaattactatgtaagacgctttatgataactgtgccatttgaaaatattaatgttcaaaacaagattcctatctcaatcgatatcaaagatttatacaataaaattgttattcaacgtcgtggcggtttttgctatgaattaaatcatttgtttgctacgtatttagaacataaaggcttccatgtcactcgtgctgcggcaacagttcacacaccaaatggtggacgtagtcctgaaggctcgcatatgtcactttacgttaatatcgaaggaacactttatattactgatgttggatttggtgatttacctacaagtattatcgagataggttctaaaacacaattcattccaacatatgataaaaatggagtttaccgtgctgtttggattaatgacaatcaatatgccttacagaagcttagacaaaataaatggatgacactctatgaagcgcatttaaaatctcaaagcattaaagactttgaagataaaataagctacaatgagcatcatcctcattctatttttgtacgacatttgcttattacacaaccacaatcatttggacgtgcaacaatgacttatcattctttaactttaagcaatgatagtactaaacataaatatgacgttactaccaataactacaaatatttttttaaaaaatattttaatttaaacgtatcaattatcccatttgaacaataa

SEQ ID NO: 8587 - DNA, 636 bp, Staphylococcus epidermidis
atgaataaacttatagacttttctaaaggattagtaccagtaattttgcaacatgcacaaacggatagcgtattaatgttgggatatatgaatgaagaagcttatcaaaaaactctgaaagaaaagaaagtaaccttcttctctagatctaaacaacgtttatggactaaaggtgaaacttctggtcatttccaacacgttgagagtattcatctagattgtgatcaagatgcaatcttaatcaaagtgatgccacaaggtcctacatgtcacactggaagtctgagttgttttaatagtgaaattgaatcacgctttaaaattcaagcattagcacaaacgattcatcaaagtgctaaaagcaatcaatctaactcctacactcaatatttattaaaggaaggcatcgagaaaatatccaagaaatttggtgaagaggcatttgaagttgtgataggtgcgataaaacataatcgtgaagaagttattaatgaaacagcagatgtcatgtatcacctttttgtgttactacatagtttagatattccattttcagaagtagaacaggtactagcgcatcgccatcaaaaaagaaataattttaaaggcgaacgcaaagaggttcgagaatggtaa

SEQ ID NO: 8588 - DNA, 759 bp, Staphylococcus epidermidis
ttgattaaaaaaagagtgattccatgtttagatgttaaagatggacgcgtcgtaaagggtatccagttccagtcattaagagatatcggtaatccagttgatttggctctttattataatgaagccggtgcagatgaactagtctttcttgatatttcgaagacggaagcaggacatgatcttatgatagaagtgatagaagcaacggcaaaacaattatttatccctttaacagtaggaggagggattcaaaatttagatgatattacacaactattaaatcacggagcagataaaatatcactcaattcaagcgctttaaaacatccagaattaattcgacaagcaagcgagaaatttggtcgtcaatgtatttgtattgctattgatagcttttatgataaagacagaaaggattatttctgtactacgcacggtggtaaaaaattaactgatgtcagagtatatgattgggtacaagaagtagagcatttaggtgccggggaattacttataactagcatgcatcatgatggaatgaaacaaggttttgatattgaacatttagcaaaaattaaacaattagttaatattccgattatcgcctctgggggtggaggaaatgcacaacattttgttgaactattccaacaaacagatgtttcggcaggtttagcggcaagtattttacatgatcaagaaactacagtggcagaaattaaagataaaatgcgtgaaggaggtatccttgtgagatga

SEQ ID NO: 8589 - DNA, 705 bp, Staphylococcus epidermidis
atgattgatttatggccagctattgatttgattaattcaacaagtgttcgattaactgaaggcaaatatgattcaaaagaaaaaatgaaaaaatctgtagaagacagtatccgattttatagtcaatttaaatgtgtgaaacgtatacatattgtagatttaattggggctaaagcaaaagaggtaaaagaattcgactacatccgttccttaagaaagttgaccactaagcctatagaagtgggtggcggcattcgttcaaaacaaacaattgaaaattatattcattcaggaatagactattgtattgtaggtacaaaaggtatccaagatatagagtggttaacacatattacacatcaatttccaaataaactctacttatccgtagatgcttttggagagaaaataaagattaatggatggaaagaggatgctaaactcaatttatttgattatgttgccaaaattgagcatttacctttgggtggtgtgatttataccgatatttcgaaagatggtaaactttctggacctaattttgatttgacaggttgtctcgcactttatacatcgttacctgtgattgcttcaggaggtattagacatcaagaggacttgtttcgattagaatcgttaaatgttcatgctgctattgtaggaaaagcagcacatctggatgaattctgggagggattatcttga

SEQ ID NO: 8590 - DNA, 579 bp, Staphylococcus epidermidis
atgattgcgattattgattatggattgggaaacataagtaacgttactcgagcgattcaacatttaggatatgatgtgattttgacatgtaatgataaagacgtgcaaaaagctgaagctatcgtacttccaggtgttggacattttcaggatgcgatgcattctatagaagaaaaaagcatcaaagatatgcttaaaaatatacatgataaaccggtaattggaatatgtttaggtatgcaattactctttcaacatagcgcagaaggtgacgttagtggattggaacttgtcccgggaaatatagtgccaatccaatcatctcatcctattcctcatttggggtggaatgaattaaaaagtacacatcccttactgcaaggtgatgtgtattttgttcattcatatcaagcagaaatgtcagaatatgtagtagcttatgctgactatggtacaaagattccgggagttattcaataccgaaattatataggtatccagtttcatcctgaaaaaagtggaacgtatggattagagattctaaatcaagcgcttaaaggagggtttattaatgattga

SEQ ID NO: 8591 - DNA, 579 bp, Staphylococcus epidermidis
atgaactatcaaatcaaaagaaacactgaagaaactcagcttaatatttcactggctaataacggaacacaatctcatattaatactggtgtaggatttttagatcatatgttaacgctatttacttttcatagtggattaactttatctattgaggccactggagatacgtatgttgatgatcatcatataactgaagatataggtatagttattggacaattacttcttgaattagttaagactcaacaaagttttacaagatatggttgctcatatgtacccatggatgaggcgcttgctcgaacagtagtggacattagtggccgtccatatttctcatttaatagcaagttgagcgcccaaaaggtaggaacttttgacactgaactagttgaagaattttttagagcattggtaattaatgcgcgattaaccgttcacattgacttattaagaggtggaaatacacatcatgagattgaggcaatatttaaatcttttgcaagagcattaaagatttctcttgcacaaaatgaagatggacgtattccatcgtctaaaggagtaattgaatga

SEQ ID NO: 8592 - DNA, 1245 bp, Staphylococcus epidermidis
atgcttagcgcacaacaatttttaaaagaatttaataatgttgaatctctaaatgaatctttgtacgagatagtgagtcacatttgtgaagaagttaaattacagggagataaagctttaaaaaattataatttacaatttgatcaagtggaaactgagaagcttgaattagagcaaagccaattaaaaaatgcatacgacatgctagataatgaaacacgagatgcattagagcaaagctatcagagaattaaagtgtaccaagaaaatattaaggtaaaacaggaatcatctcaacaaactgaatgttatgaacgataccatcctatcgaacgtgtaggtatttacgtgccgggaggtaaggctagctatccgtctacagtattaatgactgcaacacttgctcaagtagcaggtgttaatgagattactgttgttaccccacctcaaaataacggtatatgtcaagaggtgttagccgcttgttacattacaggcgttcatcatgtttatcaagtcggcggagcacaaagtattgcagcgctaacttatggcacggaaactataaaaaaagtcgacaaaatcgtaggtccagggaatcaatatgttgcttatgctaaaaagtttgtattcggtcaagtaggcatagaccaaatcgcaggaccgacagaaatagccttgattatagacgaaagtgctgacttagacgcaatcgcttatgacgtatttgcacaagcagaacatgatgaaatggcttgtacttatgtgattagtgaaaatgaaaaggtacttaatcaattgaacactataatacaagagaaacttcagtatgttgaacggcaagatatcatatcacaaagtattgctaaccatcattatctaatattagctcaagatactgaagaagcatgtttaattatgaacacgattgcacctgaacatgcatctattcaaactcgagcacctgaaatgtatatagataaagttaaatatgtaggcgcactttttttaggtcatttttctcctgaagttattggggactatgtggcaggtccaagtcatgtactccctactaatcaaacagctagatttacaaatgggctttctgtgaatgactttatgacacgacattcagtcattcatttatcacaaaaaacatttaacgaagtggcagaatctgctgagcatattgcacatatagaatctttatttaatcatgaaaaatcgattcacgtacgccgataa

SEQ ID NO: 8593 - DNA, 615 bp, Staphylococcus epidermidis; identical to SEQ ID NO: 6152

SEQ ID NO: 8594 - DNA, 813 bp, Staphylococcus epidermidis
atgaacaataccatcatttcaatgaaagaaaaggaattacgttttttaaagttttttcatcaacaaaaatataatgttgtagattttaacttaattgaagaattggattggcgacgattgactcatgaggatttgcaacaaatggatgaaagaagcttttggcaacaaaataaatctatttatgcattaagaaatgattttaccgatcaattattcagatattattcgaactatccaacacatttaaaaaaagtagcttatgcaggggatattatcagagataacagagttataaagcaagtcggcattgagaactacgagccacaatttgataatatcactcaaaatttcttagatttccaatattttattcaaaacgtacttcatgatgacattcaatttgtcattttaggtcactatcaattgattgatgcacttttagagaaaaatcatcaaactagagaagttatggagatgatagaagaacgtaatttatcagggcttattcaaaaactaactttcaatcatcccatcattcaaattcttaaagagaacacattaaatcaacttaaaatactctctcattatttacctgagcgacaccctgcaatggtggcaattcaatcttgggcacaatggtttactgatcatgggattactgaaatccaccttgatgtaactgcacaagcgcctagatcttattacaaaggtatttttataaaatgtcatcttaaaaatactactcatagcgttttgacaggtggatattatcacggttcactagaaggttttggtttaggattaacactttaa

SEQ ID NO: 8595 - DNA, 414 bp, Staphylococcus epidermidis
atggctataattaacttatctcatcgtggtgatacttcttttgacaaacttctcggacatctccctagtgttcaagaaaaatggaatgcattggaagatataaaaaatgaggggcaattatctgttgatttaaaagaagaaattaggaaaatactagctcaaaacagtggttgtctatactgcaaatctaaaggaaaacccaataagaaatttaccgatgaaaaatctatagtttgcataggttttgttgatgtttatgtgtcacaaaatggacgggttccacaatctacaatacaggttttaacaaagacactgactgatatagaaattgtagaattgttagcattcatatcatttacccactgtcaacaagaatttggtgctatgatgaatttacaacctagcaataactga

SEQ ID NO: 8596 - DNA, 411 bp, Staphylococcus epidermidis
ttggacctaacaaatcaaaaaatcctacacttacttgagcaaaatagtaagctatcgctttctgaaattggaaaggaagtaaatttatctacaccctctgttcgagaacgaatctataaacttattgattcgaaaatcattgaacgatatacaatcgacattaattacgatgcattaggtttcgatattaatgttttgatagaagtaactataaaaaataacctatataaagatttcaaagcatttatttcagttcaaaacaatgttgatttttgctatagaatttctggagatagttgctttatatttaaagcgcattttaaaaagatgagcgaagtcgaaacactcatcaacgaaatccaatattatggtcatacaaaaacacattttatattttcagaaacaaaatag

SEQ ID NO: 8597 - DNA, 408 bp, Staphylococcus epidermidis; identical to SEQ ID NO: 6156

SEQ ID NO: 8598 - DNA, 1269 bp, Staphylococcus epidermidis
gtgacagtaagaactaaagtttcgacaaaagatatagatgaagcatatttacgtctaaaaaatatagtaaaagaaactcccttacaattcgaccattacttatctcaaaaatataattgtaatgtttatttaaaaagagaagatttacagtgggtacgatcctttaaattaagaggagcttataatgctatttcagtattatccaatgaagaaaaaaataaaggtattacttgcgcaagtgctggaaatcatgctcaaggtgttgcttatactgccaaaaaactcaatttaaaagctgttattttcatgccagtaactacaccacgacaaaaaatcaatcaagtcaaattcttcggggatagtaacgtagaaatagtattaattggcgatacatttgatcactgcttagcacaagctttaaactatacgaagcaacataaaatgaattttattgacccatttaataatgtatatactattgcaggacaaggcactttagctaaggaaatattaaatcaagctgaaaaagaggataaaacatttgattatgtatttgctgctataggtggtggcggtcttatttcaggagtgagcacatattttaaagcacattccccccatactaaaattattggtgttgaaccaaccggtgccagtagtatgtatcaatcagtcgttatcaaccatagtatagttactttagaaaatattgataagtttgttgatggagcttcagtagcaagagttggtgatattacctttgatattgcgaaagataaagtggatgattatgttcaagttgacgaaggagctgtttgctccacaattctggatatgtactctaaacaagcgattgttgctgaaccagctggtgctttaagtgtaagtgccttagaacaatataaaaagcagattgaaaataaaactattgtatgcatagtaagtggaggcaacaatgatattaatcgaatgaaagaaattgaggagcgttcccttctatttgaagaaatgaaacattactttattttaaatttcccacaaagacctggtgctttaagagaatttgtcaatgatgtcctcggacctcaagacgatattacaaaatttgaatatttaaagaaaacatcacaaaacactggaactgttattataggtatacagctgaaacatcatgatgatctcattcagttaaaagatcgcgtatgtcaatttgatccttctaatatttatatcaatgaaaataaaatgttatattcattacttatttaa

SEQ ID NO: 8599 - DNA, 570 bp, Staphylococcus epidermidis
ttggaaatcaaaccaatcactatatataccggaaaaactgtcccccttttttatgacaatatagatactgaccaaatcattcccaaagtgcatcttaagcgggtctctaaatcaggctttggaccttttgcttttgatgaatggcgttacttacctgatggtagtgataatcctgattttaatcctaataaaccaaaatatcatggtgcgtcaattctaattactggagataactttggttgtggttctagccgtgagcatgcagcgtgggccttaaaagattatggttttaacattattattgcaggaagttttagtgacatcttttacatgaattgtactaaaaacgcaatgttacctatatgtttaaatcagaaagaaagagaacatttagctcaatttgatgaaataactgttgatttatctaatcaaacagtgtctacggtgtctcagtcttttcattttgatatagatgaaacctggaaaaataaattaatccatggcttagacgatattgctattactttacaatttgaaaatttaatagaaaaatacgaaaaaactttttaa

SEQ ID NO: 8600 - DNA, 1371 bp, Staphylococcus epidermidis
atgggtcaaacactgtttgataaagtatggaaaaaacatgtgcttcatggaaaagaaggtgaaccacaattattatacattgatttacatctcattcatgaagtcacttctcctcaagcgtttgaaggacttagaatacaaaatcgtaaactcagaagacctgatctaacctttgcaactttagatcataacgttcccacaattgatatttttaatataaaagatgaaattgctaataaacaaattacaactttacaacaaaatgctaaggactttggtgtacatatttttgatatgggttctgacgaacaaggtattgtgcatatggttggaccagaaactggattaactcaaccaggaaaaactattgtatgtggagattcacatactgctacacatggcgcatttggtgctatcgcatttgggataggaacaagcgaggttgaacatgtatttgccacacaaacattatggcaaacaaaacctaaaaatttgaaaattaatataaatggttctttaccagctggagtttatgctaaagacattattttatatttaatcaatcaatatggtgtagatttcggtactggttatgctcttgaatttacaggagaaactataaaaaatttatccatggaagcacgtatgacgatttgtaatatggctattgaagcaggagcaaagtatggtttaatgcaacctgatgaaacaacctttaattacgtaaaaggtcgtccttatgctactgattttgatagttctatggcgtggtggaaagaactttattctgatgatgatgcctattttgataaagttattgaacttgatgtaacaaatttagaacctcaagtaacttggggaactaacccagaaatgggagttagttttagtaatccattcccagaaattaaaaatgcaaatgaccaacgtgcttatgactatatgggacttcacccaggtcaaaaagccgaagatataaaattaggttatgtttttttaggttcatgcacgaatgcaagattatctgatcttattgaagcaagtcatattattaaaggacaacaagttcatccaaatattactgctattgtggttccgggttcaagaactgttaagaaggaagctgaagctctgggactagataaattatttaaagatgctggatttgagtggcgtgaaccaggatgttctatgtgcttaggtatgaatccagatcaagttcctgaaggagtacattgtgcatccacgagtaatcgcaattttgaaggaagacaaggcaaaggcgctcgtacacatttggtatcccctgttatggctgctgctgctgcgattaatggtaaattcattgatgttagaaaggtggtagtataa

SEQ ID NO: 8601 - DNA, 1044 bp, Staphylococcus epidermidis
atgagttataaaatagttgccttacctggagatggtataggaccagagattctatctggtacattagaacttttaaaattaataagtgaaaaatatcattttgaataccatttggaaagtcatcattttggaggtgtttcaatagattattatggtacacctttaactaacgaaacattacaatcatgtaaaaatgcagatgctattttattaggcgcgattggagggcctaaatggacagacccaaataatcgtccagaacacggtttgttaaaactgaggaaatccttaaatttatttgctaatattcgacctacatttgtaactaaaggggctagtcatctttcaccactaaaacaagatattgtagaaggcacagatttagttatagtaagagaattaacgagcgggatttattttggtgaaccaagctatgttaaaaaaaccgaagctttagactcattaaaatattcaagtcaagaaattgaacgtattgtgagaatcgcttttaatcttgcaaatcgtagacgtaaaaaattaacttctgttgataaggaaaacgttctatcctctagtaagttatggcgacaaatagtaaacgatgtaaaaaaggattatccagaagtagaagttaatcatatgctagttgatgcttgtagcatgcatctgatcactcaacctacgcaatttgatgtgattgtaacagagaatcttttcggagatattttaagtgatgaagcatctgttataccagggtctctaggtctttctccatcagctagttttggtcaaacaggtacacgtctttatgaaccaattcatggttcagcaccagatatagctaatgaagataaagcgaatccatttggtatggttctatctttagcactttgcttaagagaaagtttaaatcaaaatgatgctgctaacgaacttgagtcaattgtttactcgtttattcaatctaataagacaactgcagatttaggtggacaatatcgaacttcaaaaatttttaaattgcttaaagaaaaatatctataa

SEQ ID NO: 8602 - DNA, 1536 bp, Staphylococcus epidermidis; identical to SEQ ID NO: 6256

SEQ ID NO: 8603 - DNA, 1005 bp, Staphylococcus epidermidis; identical to SEQ ID NO: 6257

SEQ ID NO: 8604 - DNA, 234 bp, Staphylococcus epidermidis; identical to SEQ ID NO: 4344

SEQ ID NO: 8605 - DNA, 1743 bp, Staphylococcus epidermidis
atgtcaaatcaaaaatcaatggcttcgcctcacccttctgtgcatcaaacaaaggaatcacaacccttaataacacgcagtggttctcaattattagttgaagcacttcagcaggaagatgtagattttatcttcggttatcccggtggagctgtcttacctttatacgatacattttatgacgggaaaatcaaacatattcttgctcgtcatgaacaaggtgctacacatgctgctgaaggatatgcgcgtgtctctggtaaaacaggagtcgttgttgtgacaagtggacccggtgcaacaaatgccattacaggtattactgatgcatatagcgactctttaccactagtcgtttttactggtcaagttgctacacctggtattggtaaagatgctttccaagaagctgatttactctcgatgactacacctattacaaaacacaattatcaagttaaaaagattgaagacattccaagaattgttcatgaagcctttcatttagcgaacactggaagaaaaggtcctgtagtgattgatttccctaaagatatgggtgtgcttaaaactgatgttgaacttacaaaagatattaatattcctggttatgaagttaatagtaacccaaataaagaggatattaataagttaatatatatgattaaagaagctaagaaacctcttattcttgcaggtgctggtattaatcactctaaatctaatcatttattaacagaatttgtgacaagacatcaaatccctacagttacaactctcctaggacttggagcagtaccttatcatcaccctttattcttaggtatgggaggtatgcatggatcttatgcaagtaatatggctttaacaaattgtgatttacttatcaatttaggtagtagattcgatgatcgtcttgcaagtaagcctgatgcattcgcaccaaatgcaaaggttgtacatgtagatatcgacccttctgaaataaataaagttattaatacagatttaggtatagtcgctgattgcaagcttgtgcttgagaacttatgccatgagcaagttttaacatcctcccacgaagaatggaacgattattgtattaataacaaaagtaactatccatttaaatatgatgaaaatgataaaaacttttgcaaaccacaaaaagcgattgaatatattggcaaagttaccaatggaaatgcaattgttacaactgacgtaggccaacaccaaatgtggacagcacaattctatccatttaaaaattatggacaatgggtaacaagtggtggtttaggtactatgggatttggaattccatcagcaataggagcacaattagctgaacctgagaaaacagttgtatgttttgtaggagatggcggttttcaaatgacgaaccaagaaatggctttacttccagaatatggacttaatgtcaaaatagtacttattaataacggaactttaggtatggtaaaacaatggcaagataaattctttaataaacgattttctcattctgtatttaacgatcaacctgattttatgaaaatggcggaagcatatggtattaagggattcttgatagattctccagataaattagaatcttcaattgatgaagcatttgcatatcatggaccggcactcattgaagttagaatctcacctatagaaccagttaatccaatggtacctagtggcaaatcaaatcatgaaatggagggttactaa

SEQ ID NO: 8606 - DNA, 1689 bp, Staphylococcus epidermidis
atgcgaagtgatatgatcaaaaaaggagatcaccaagctcctgcaagaagtcttttacatgcgactggcgctcttaaacaacctacagatatgaataaacctttcgtagcaatttgtaactcttatattgatattgttcctgggcacgttcatttaagagaattagcagacatcgcaaaggaagctattagagaagcaggtgctatcccattcgaatttaatactattggtgttgacgatggaatcgctatgggacatattggcatgagatattccttaccttcaagagaaattatcgcagatgcagctgaaacagttattaacgctcattggtttgatggtgttttttacattcctaattgcgataaaattacgccaggaatgttactcgcagctgttagaacaaatgtaccagctatcttttgctcaggaggcccaatgaaagctggtctttccgctcaaggtaaggcattgacattatcttcaatgtttgaagcggttggagcttttaaagaaggaacaatctcaaaagaagcatttttagacatggagcaaaacgcttgtcctacatgtggttcgtgcgccggtatgtttaccgcaaactcaatgaactgtttaatggaagttttaggtttagccctaccatataatggtacagctctagctgtgagtgaccaacgtcgtgaaatgattagacaagctgcattcaggttggttgaaaatattaaaaatgatattaaacctcgcgatattatcacacaagatgcaattgatgatgcttttgctcttgatatggccatgggaggttctactaatactgttcttcatactcttgcaattgcaaatgaagcaggtattgactacgatttagaacgtattaatgaaattgctaaaaaaacaccttacctttctaaaattgcacctagttcttcttattctatgcacgatgttcatgaagcaggtggcgtcccagctattataaatgaattgatgaaaaaggatggtactttacatccggatagattaacagttacgggtaaaaccttgagagaaaataatgaaggtaaaaacatcaaaaattttgatgttattcatcctcttgaaaacccttatgataaacaaggtggattatctgttttattcggaaacctcgcacctaaaggagcggtaatcaaggtcggtggagttgatccttcaattaaagtatttacaggaaaggcaatttgttttaactctcatgatgaagctgttgaagccattgataatcatacagtaagagaaggacatgttgttgttattagatatgagggacctaagggaggtcctggaatgccagaaatgctagcccctacgtcttccatagtgggcagaggattaggtaaagatgttgcattaattacggacggtagattttcgggagcaactagaggtattgcagttggacatatttcacctgaagccgcttcaggtggacccattggcttaataagagatggtgataaaattacgattgatttaatcaatagaactctaaacgtcaatcaatctgaagaagaactgtatcgccgtaaaaatcagcttgaaccattcagagcaaaggttaaaacaggctacttagctagatatactagtttagtcacaagcgctaatactggaggtattatgcaagttccggaaaaccttatttaa

SEQ ID NO: 8607 - DNA, 780 bp, Staphylococcus epidermidis; identical to SEQ ID NO: 3546

SEQ ID NO: 8608 - DNA, 939 bp, Staphylococcus epidermidis; identical to SEQ ID NO: 3545

SEQ ID NO: 8609 - DNA, 447 bp, Staphylococcus epidermidis; identical to SEQ ID NO: 3544

SEQ ID NO: 8610 - DNA, 300 bp, Staphylococcus epidermidis; identical to SEQ ID NO: 3543

SEQ ID NO: 8611 - DNA, 198 bp, Staphylococcus epidermidis; identical to SEQ ID NO: 3542

SEQ ID NO: 8612 - DNA, 384 bp, Staphylococcus epidermidis; identical to SEQ ID NO: 3541

SEQ ID NO: 8613 - DNA, 1200 bp, Staphylococcus epidermidis; identical to SEQ ID NO: 3540

SEQ ID NO: 8614 - DNA, 705 bp, Staphylococcus epidermidis; identical to SEQ ID NO: 3539

SEQ ID NO: 8615 - DNA, 468 bp, Staphylococcus epidermidis; identical to SEQ ID NO: 3538

SEQ ID NO: 8616 - DNA, 1173 bp, Staphylococcus epidermidis; identical to SEQ ID NO: 3537

SEQ ID NO: 8617 - DNA, 732 bp, Staphylococcus epidermidis; identical to SEQ ID NO: 3554

SEQ ID NO: 8618 - DNA, 621 bp, Staphylococcus epidermidis
gtggaacgtaatggtaggtcttttgaaaaatttgttttatttacttcatacaaagtagatttagacgaagaatgtgtatctattagtgttaatcctgatttaaaacatattttaaattctataacagctgattttacgaaatttgaattaaaagaaatgacccatcttaaatctacttacgctaaaaatatgtttagattgcttaaacaatataaacatactggttatattaaaataaatatatctgattttaaaaatcgtctagatatacctaaaacttatcagatgaatgatataaccaaacgtgtattaaagccaataattaatgaactttcttcaatttttaataatcttaatatcaataaaattaaggcaaaaaaaggacgtaaaattgaatggctagagtttacctttgacgctgagaaacgtattcactccaagcgacagcctgaaataaaagatgtaggtaaaccacgacagatgataagtcgtgagaaaacgccaaaatggttagaagaacgagataatccgaaatatcagaataaatataacgttgacgaaaattttgaaaaagataaagaagcttttttaaagcaacttaaagtggattgggaagaataa

SEQ ID NO: 8619 - DNA, 519 bp, Staphylococcus epidermidis; identical to SEQ ID NO: 6157

SEQ ID NO: 8620 - DNA, 1497 bp, Staphylococcus epidermidis
atggctaataaagagtcaaaaaatgttgttattattggcgctggtgtcttaagtacgacatttggttctatgattaaagaattagaacctgattggaacatcaaactctatgaacgcttagatcgtccaggtattgaaagttctaacgaaagaaacaatgccggtacaggacatgcggcgttatgtgaattgaactatacagtacaacaacctgatggttcaattgatatagaaaaagccaaagaaatcaacgaacaattcgagatttcaaaacaattctggggtcacttagtaaaaagtggtaacatcagtaatcctagagatttcattaatccacttcctcacattagtttcgtaagaggtaaaaataacgttaaattcttaaaaaaccgttacgaagcaatgcgtaacttccctatgttcgataacatcgaatatacagaagatatcgaagaaatgagaaaatggatgccattaatgatgacaggtcgtactggtaacgaaatcatggcggctagtaaaattgacgaaggtacagatgttaactacggtgaattaactcgtaaaatggcaaaaagtattgaaaaacatccaaatgctgatgttcaatacaaccacgaagtaattaatttcaatcgtcgtaaagacggtacttgggaagttaaagttaaaaaccgtaattctggagacgttgaaactgttctagctgattatgtatttatcggtgcaggcggtggcgctattccactattacaaaaaactggtatcccagaaagtaaacatcttggtggattccctatcagtggtcagttcttaatttgtacaaaccctgatgtaattaatgaacatgacgtcaaagtatatggtaaagaaccaccaggcacacctccaatgactgtaccacacttagatacacgttatatcgaaggtgaaagaacattattatttggaccatttgcaaatattggccctaaattcttaagaaacggttctaacttagacttattcaaatcagttaaaccttataacatcacaacattactagcatctgcagttaaaaacttacctttaatcaaatactctatcgaccaagtattaatgactaaagaaggttgtatgaaccatctacgcacgttctaccctgaagctcgtgacgaagattggcaattatacactgcaggtaaacgtgttcaagttatcaaagatactaaagaacacggtaaaggattcattcaatttggtacagaagttgttaactctaaagaccactctgttatcgcactattgggtgaatcacctggagcatcaacttcagtatcagtagccctagaagttttagagaaaaactttgctgagtatgaaaaagattggactccaaaattacaaaaaatgattccatcatatggtaaatctcttatcgatgatgttaagttaatgagagcaactcgtaaacaaacatctaaagatttagaattaaattattacgaatctaaataa

SEQ ID NO: 8621 - DNA, 516 bp, Staphylococcus epidermidis; identical to SEQ ID NO: 3697

SEQ ID NO: 8622 - DNA, 978 bp, Staphylococcus epidermidis
atggcaaatcaaaaattaccaacattaaaatatactggtaaatcagaaagtgcagtgccaattgtgtcagaaagtgaattgcaaacggtaacagcagagccgtgggtgaaaatttcagataaagggttacaactagaaggacttaattttaatcgcgaaggtcagttattcttattagacgtgtttgaagggaatatttttaaagttaatcccgcaacaaaagaggttacaacaaaatttcagtctgttaaagataatccggcagcgattaaagtacataaagatggtcgtttatttatctgttatctaggtgattttaagacaactggaggcatatttgcgacaacagaaaaaggtgaacaaatagaagaaattatttctgatttaaatacagaatattgtattgatgacatggtttttgacagtaaaggcggattttatttcacggattttagagggtattctacacaacctttgggcggtgtttactatgtagatccagactttaagacggttacgccaattattcaaaatatttctgtggcgaatggtattgctttaagtacggatgaaaaagtgctatgggtaactgaaactacaactaatcgacttcaccgaatcgcattagagaatgatggtgtgactattgcaccatttggagcgacaataccatattattttacaggtcatgaaggaccggattcttgttgtattgatagtgatgataatttatatgtagctatgtatggccaaggacgtgtattagttttcaataagagaggttatcctataggtcaaattttaatgccaggacgtgatgatggaaagatgttacgtacaacacatccacaatttatacctggtacaaatcaacttataatttgtactaatgatattgaaaaccattctgaaggtggatctatgctttatacagttaatggttttgctaaaggatatgagagttatcaatttcaataa

SEQ ID NO: 8623 - DNA, 963 bp, Staphylococcus epidermidis; identical to SEQ ID NO: 3695

SEQ ID NO: 8624 - DNA, 639 bp, Staphylococcus epidermidis
atggaaatattagtcacagcatttgaaccatttggagatgaaaaaattaattctgcactagaggctgttagccatttggaaactaaaattggctgtcataaaattgatcgattgatacttcccacagtatttcatgactctgcggatatgattgctaaagtgttaaaatctaaaaattatgatgttgctctagctatcggacaagcaggtggtcgtagtgaaatcactcctgagcgtgtaggtataaatatagatgacgcacgcattaaagataatcaaggacaccaacctattgatcaagttatacgtcacgatggcgcacctgcttatttttctaatttacctatcaaaagaatgacaatggcaattcaaaaggctggtcttcctagcagactatctaattccgctggaacatttgtatgtaatcatatcttatatcaactcggatatatggcagaccatttttaccctgacttattattgggatttatacacgtgcctttgattcctgaacaaacaatcaatcattctcaacaatcttcaatgtccgttgaagatatcgtaaaaggattaactgaagcaatcaaagctatcgacttcgttgaagataacaagatcgcattaggagaaatccaatag

SEQ ID NO: 8625 - DNA, 561 bp, Staphylococcus epidermidis; identical to SEQ ID NO: 3693

SEQ ID NO: 8626 - DNA, 1611 bp, Staphylococcus epidermidis; identical to SEQ ID NO: 3692

SEQ ID NO: 8627 - DNA, 513 bp, Staphylococcus epidermidis; identical to SEQ ID NO: 3691

SEQ ID NO: 8628 - DNA, 117 bp, Staphylococcus epidermidis; identical to SEQ ID NO: 7071

SEQ ID NO: 8629 - DNA, 747 bp, Staphylococcus epidermidis
atgatttatttacaaaattttattactacaactatccaattaaatatctatcttattttagttattggactgctttacgtaatcatccactattatagaaataaaggtgttaacgctttcttagatatttatttaaattatataccggtacttacacacgaatttggccacgtcttatttaacaaactcgctggtggaaaggccaaagatcttgtcattgtgacaagccctagagaaagaaaagtcacttcacaacaaggctatgcgattacacaatctaaaggatacttaggtcagtttattacaactataggtgggtatcttatgccaccattgatgtttttaactggattggtatctattcactatcaatatccaagtatatttattactatatatttatttatttttatatattatttgtttattacttcccgtaaactatcacctttgattgtcattatactcatctcaagtttactctatttagtatttaaacaagaccatcaatggttcatttacgacattgtcacattaagttaccattttattttaggcgtacttttaggtgaaatattacaatcctcatggacgatttttcgtcttacctttcaacgacctaaaccttcttgggatggcagtgctttaacgaaagttactcgagtacccacctttatctttagtttagtgtggatattattcaatctctatactgtgtatttattaatcaaatacacaatactataa

SEQ ID NO: 8630 - DNA, 795 bp, Staphylococcus epidermidis
atgcattttaaacgtgttgtaaagtggggattgaatatgtatcaaaaccaaagaataaaagataaaattaacatattaggtgtaaattttgataatactacaatgctggaaatgttagaaaatattaaacaattcatatctagcaatacagatgataatttatttatagtgactgctaatcctgaaatcgtggattatgcaactgaacatgagctatatagaaatttaattaatcaagctgattatgtagttccagatggtacaggaatagtaaaagcttcaaagcgattaaaacagcccttaaaacggcgtgtgccaggaatagaacttcttgaagaatgtctgaaaatagcacatgtcagccatcagcgcgtatatctgcttggatctaaaaatgaaattgttgagacagcagagaaaaagcttcaatctcaataccctaatatccactttgcacatcatcatggctatattcatctagaagatgaaacagtcataaaacgtataacaagttttaatcccgattacatttttgtaggaatgggatttccaaagcaagaacaatggattcaaaagcataaggacaagtttaagcacactgtaatgatgggcgtaggtgggtcgtttgaagtattcagtggctcaaagaaaagagcacctcaaatatttagaaagttaaatattgagtgggtatatcgtgtacttattgattggaaacgtattgggagaatgataagtattcctaaatttatgttaaaggtagcaatacaaaaatataaaatgaaatcaaaataa

SEQ ID NO: 8631 - DNA, 795 bp, Staphylococcus epidermidis
atgagcgtttcggtaaatattgaaaatttaacaaaagaataccgtatctatagaaataataaagatagaattaaagatgcattaatacctaaaaacaaaaataaaacattttacgctctggataacgtaagtttaacagcgcatgagggagatgtgataggcttagtcggcatcaacggttcaggtaagtctactttaagtaatatgattggtggctctatttcaccaagttccggtgaaataacgagacatggtgatgtgagtgtcatcgctattaatgcaggactaaatggacaattgacaggtgtagaaaatattgaatttaaaatgctctgcatgggctttaaaagaaaagaaattaaaaaattaatgccggaaattatagaatttagtgaactcggcgaatttatttatcaacctgttaaaaaatattcaagtggtatgcgtgcaaaacttggattttcaattaatattactgttaatcctgacatattagttattgacgaagcattatcagtaggcgatcaaacatttactcaaaaatgtttagataaaatttatgaatttaaagcggctaaaaaaacaatattttttgttagtcataatattagacaagtgcgtgaattttgtacaaaaatcgcttggattgagggcggtaaactaaaagaattcggcgaacttgaagaagtattacctgattatgaggcgtttcttaaaacttttaagaaaaaatctaaagcagaacaaaaggaatttagaaataaattagatgagtcacgttttgtcgtaaaataa

SEQ ID NO: 8632 - DNA, 813 bp, Staphylococcus epidermidis
atgttcgcagttggaacggttttaaaagaacatattaaaaacttctatttaattcaaagactagcacaattccaaattaaaattaccaatcataataactatctaggtattgcatgggaagtgttgaatcctgctttacaaatcatggtgtattggcttgtttttggtttaggaattagaagcaatgcacctatacacggcattccgtttgtattttggttgttagttggtataagtatgtggttctttattaatcaaggtgtcttagaaggaactaaatcaatctcacagaaattcaatcaagtggcaaagatgaatttcccactctcaatcattcctacttatattgtaacaagtaggttctatggtcatttaggattattagcaattattataatagcttgtatgttcaatggaattatcccttcaattcacattgtacaattacttatatatgtaccttttgcatatttgctaacatcgtcggtggcacttttaacatccactttggggattttaattagagatacgcagatgattatgcaagcattaatgagaatattgttttatatgtctccaattttatgggtgccaaaaaatcacggcgtaagtggtttgattcatcaaattatgttatttaatccagtatattttatcgcagaatcataccgagcagcgatattgttccatcaatggtatttcatagatcattggaagttaatgctatataacgttattatcattctcttattctttatagtaggttctattttacatagacgctatagagatcactttgcggacttcttgtaa

SEQ ID NO: 8633 - DNA, 1092 bp, Staphylococcus epidermidis
atgagattgataattaaaaagatttatatcatagctattgtgcttttaaatatggtttttaaaccgtttaatgtaaattcgaagcacattgtgataatgatgacctttaagcaagatatactgcctattatagaggccttatgtagtgaaggataccatgtgacggttataggtaaaaaaatatatcagaaagatattaataacattaatcatgcatattttatacctgccggaaataaatatattatgagacatatgaaagtattaagtaaagcaaagattattattttagatacgtattatttaatgatgggtggctatcagaagaaaaaagggcaaactgttattcaaacatggcatgctgctggtgcgcttaaaaattttggcttaactgatcatcaagttgatttaaaaaataaggctatggtaagacaatacaaaaaagtttatgatgctaccgattattatttggtaggtggggagaaaatggctcaatgttttatacaatcgtttgatgcatctccatcgcaaatgttaaagtttggacttccaagactgacccaatactttagaagcaatcttaagttagaacaacaacgattaaaaaagaaatatcatattacaaataaactcgcagtatatgttccgacttatagagaaggtcaagtagcacaacgtactattgataaagaaaactttgaacggcacttgccgaattatacgttattgagtcatttgcatccttcgactgttgattgtcaaacttctcattcaatcgacgttacttcattgttaattatggcggatattattataagtgattatagctcattacctattgaagcaagcgcacttaataaaccgacacttatttataattatgatgaacagcaatatgaaaaagtaagaggattgaatgaattttattatgctattccagaacgatacaaaatgagtaatgaagagtcaattatacaagcgatacaggataacgatgagcaatttcaatctttatttaatgattggcatcaatataactcaaaagatagtcttaaccagttagttcattttattaataagttggtgaaataa

SEQ ID NO: 8634 - DNA, 1065 bp, Staphylococcus epidermidis
atgaaattagcaataattattccagtgtataacgctgaagaaacgattaaacgtgctatactctcagttgatactagtgtgccttatgagattatttgtatcaatgatggttcaactgatcaaacacaacatgtacttacagaattacaacaaaaacatccacacattaaagtcattcatcagagtaatcaaggagcagctcgaagtagaaatgttggcttagaagctatgtctgaagatgttgatgcatttttatttttagacgcagatgatgagtttttacctagtaggattgatttaatggtgaatgcttttaataaaaacaaagaaaccgatgttgttatcggtcaaatggcaagagatgttaacggcgaatggcaagtcatttcgacccatcaatctatggtaaaagatgcgattgtcacacttgatcgtaaaccggatattttacaatcgataggacctggagcaaaattatttagctcgaagtatgctggattacgttttgatgaagatgtcgttttctgtgaagagcatacctttattgtcaaagcgttctctaaagcgcgagatattcaacttatacctaacattgtatatggctataatgagagagaaggatcagtaacagcgcaacgtgctgatacattcttaccttatatgagtgatgcgttaaaagttcgtcaacgcgtgatggaattactattattattagacgaaaaaatctactatagttatcgaatggataacctcatagtaagttacttaatacaggcacatttaaagaaaaataacaaaataacgcaatctttgcttgaaagtgttatagagtatatgaaagctatgcagcatacacattactcgggagaggctatgtttcgaattgttagagctgttgaacagagtgcaacacattggacaaagcctttatacttacaatggaaaaaggcacttagtgaggttggaattggcagaccaggcttaattcgttttaaacttcaagttatacctaaaaagatatccttttctggtaaagaatcactaaaaagaatttttaaaaaataa

SEQ ID NO: 8635 - DNA, 399 bp, Staphylococcus epidermidis; identical to SEQ ID NO: 3885

SEQ ID NO: 8636 - DNA, 1728 bp, Staphylococcus epidermidis
atgaaagaacaaaaccctttgtttttcttatttaaaagactctcatggccatatgggttaatcattgcagcggttatcattacttcgttgggaagtttaagtggtttattagtaccattattcaccgggcgtttagttgataaattttccgtcagtagtattaattggggaatgatagctatatttggctcgattttcttagttaatgcattgcttagcggtataggcctatatttgttaagtaaaattggtgaaaagattatttatgcgattcgttcattattgtgggaacatattattcaattaaaaatgccgttctttgataaaaatgaaagtggccaattaatgagtcgtctaacagatgatacaaaagtgattaatgaatttatttcacaaaagctacctaatttattgccttctgttttaactttaataggttcattagtcatgctatttatcatggattggaaattaactttattaacatttattactattcctgtatttattttaatcatcgttcctttgggacgtgtgatgcaaaaaatatctaccaatacgcaatctgaaattgcgaacttcagtggattattaggtagagtgcttaccgaaatgcgtttagttaaagtatctaatactgagcgtttagagttagataatgcgcatacaaatcttaaaaaaatatatagattaggattaaaacaggctaaaatatcagcagtcgtacagcccatttctggtgttgttatgctattaactattgcgattattttaggttttggtgcattagaaataggtactggagcaattactcctggaacacttatagctatgatattttatgtaatccagttatctatgccactgattaacttatcgacactagttacggattataaaaaagctgtgggtgcgagcagtcgtatatatgaaattatgcaagagcctattgaacctactgaagctttgtcagaatctaaagacgttacaatcatcgacggcgaattagtatttgagcacgtggattttaaatatgacgttaaaaagattttggaagatgtgtcatttagtattccacaaggtgaagtgagcgcgtttgtaggaccttctggttcaggtaaaagtacgatttttaatttaattgagcgcatgtatgatattgaacgtggagatattaaatacggtaatcaaagtatttttgatattccactttcaaagtggcgcacaaaaattggttatgttatgcaatctaattcgatgatgagtggaacgataagagataatattttatatggtattaatagaaaagttgatgatgaagagttaatagagtatgctaagctagctaattgtcatgattttattatgcagtttgacgaaggttacgacacgatggttggtgagcgtggactcaaattatcaggtggtcaacgacaaaggatagatatcgctagaagttttgttaaaaatcctgatattttgttattagacgaggcgacagcgaacctagatagcgaaagtgaattgaaaattcaagaagcacttgaaacacttatggaaggcagaactactgtagtcattgctcatcgactttcgactataaaaaaagctggtcaaattgtatttattgataaaggtgaagttaccggtaagggaacgcatcatgaattgatggcaagtcatgataaatacagacattttgttacatctcaaaaattatcagattaa

SEQ ID NO: 8637 - DNA, 408 bp, Staphylococcus epidermidis; identical to SEQ ID NO: 6572

SEQ ID NO: 8638 - DNA, 909 bp, Staphylococcus epidermidis
atgtactttaatatacttccaaaaatcatcggcggtattggttgggtacttgctaaagttacacgccaacctaagtttgaatcattttttggtgttgaaatgatgttcttaggtaatactgaagctcttgcagtttctagtgaacaacttaaacgaatgaatgaaatgcgggtactaactattgcgatgatgtctatgagttcagtttcaggagcaattgtgggcgcttatgtgcaaatgatacctggagaacttgtattgacggcaattccacttaatattattaacgcaattatagtttcttgtattttgaatcctgtatcagttgaagaacaagaagatgtcgtgtatagcattaaagatcaccaaactgaaagacaaccatttttctcatttcttggagattcagttttagcagctggaaagcttgtattaattatcattgcatttgtcattagctttgtagctttggctgacttaattgatagattgattcatttaatcacacatcttattgcaaatggtattggtgtcaaaggtagctttggtcttgatcaaatcttaggcgttttcatgtatccatttgctttactattaggtttaccgtttaatgaagcgtgggaagtagcacaacaaatggcgaagaaaattgtaacaaacgaatttgttgtgatgggggaaatttctaatcaagtcaatgcgatgacgcctcatcatagagcagttatatcaacatttttagtttcttttgcaaacttttcaactattggaatgattataggtacattgaaaggtattgttgataagaaaacgtcggatttcgtttccaaatatgtaccgatgatgttgttagcaggaattttagtatccttacttactgctgcatttgttggattatttgcttggtaa

SEQ ID NO: 8639 - DNA, 834 bp, Staphylococcus epidermidis; identical to SEQ ID NO: 3881

SEQ ID NO: 8640 - DNA, 798 bp, Staphylococcus epidermidis
atgagtcgtttaagtggtgaacaagtgaaaattggctacggtgattctacgattattaataatttggatgtcgcaattcctgatggaaaggttacttctattattggacctaacgggtgtgggaaatcaactttattgaaagcgttatctagactattgtcaattaaagaaggtaaaattaatttggatggtaagagtattcatgccacgtccacgaaagaaatagctaaaaaaatagcaattttaccacaatcaccagaggtcccagatggacttactgtaggagaacttgtttcttatgggcgttttccacatcaaaaaggatttggtcgtttaactgcagaagataaaaaagaaattgattgggcattgtcagttacaggtacaagtgaatttcgtcatcgtactataaatgatttaagtggtggacaaagacaacgcgtgtggattgcaatggcactagcccaacgtactgatattattttcttagatgaacctacaacttatttagatatttgtcatcaattagaaatattaaatttagtcaaaaagctcaacgaagaagaaggttgcactattgtgatggttttacatgacattaatcaagcaattcgcttctcagatcatctcattacgatgaaagctggagatattgttgctactggtcaaactgatgaagtgttaactaaggacattttagaaaaggtatttaatattgatggtgttttagatatagatccgagaacagggaaaccaattttagttacttacgatttattctgtcagacgtattcgtga

SEQ ID NO: 8641 - DNA, 501 bp, Staphylococcus epidermidis; identical to SEQ ID NO: 3879

SEQ ID NO: 8642 - DNA, 1068 bp, Staphylococcus epidermidis; identical to SEQ ID NO: 3878

SEQ ID NO: 8643 - DNA, 1068 bp, Staphylococcus epidermidis
ttgaaagggttagccatgatgaaagaaaagctaaaatggatatggataacaacactaatcatacttgttgtctcacttatattggcttttaatttgaagagtcattataaccatgttcatgataaacagaagagcaagacaaatgttcaaattaataacaaaaatgtaaaattatatagagatatctcatatggtaaaggtatacccaacagcaaattagacattattaccccagctgatatgagcaatgatacgaaattaccggtaattttttggatgcatggtggaggatttatcgctggagacaaacaatataaaaatcaattattgtcaaaagttgcagaacaaggatacatcattgtcaatgtaaattatgcgttagctccgcaatataaatatccaacgccgctagtacaactcaatcaagctgtaaagtttataaaagagaataagcatgagttacctattgattttgatcaagttgttattgggggagactctgctggcgctcagttaactagtcaatatgtagctatgcaaaccaatgaagacttgagagatgaaatgcattttgaacagcagttcaagccttcacaaataaaggctgctgtattttttggtggtttttataatatgaaaactgttaaagcaactgagtttccgagaatacaattatttatgaaaagttatactggaacaagtcattgggaaacagattttaaaaacttatctcaaatgtcaacgctcaatcaagtgactcacgaatacccaccgacatttctttcggttggtgacgctgatcctttttatagtcaaaataaagaatttgcgcaaggtttgaaaacagaaaatattccagtagatacattattctatgatggttcgcatcacttacatcatcaatatcaatttcatctagataaaccggaatcaaaagagaatatcaaaaaagtactgctatttttaagtcgaaacacatcatcttctggagtggagagtaacgagtcatcacaaaatcagccaactcaaaatactaatgaagtatccttatacccttttgattcttaa

SEQ ID NO: 8644 - DNA, 507 bp, Staphylococcus epidermidis; identical to SEQ ID NO: 3876

SEQ ID NO: 8645 - DNA, 924 bp, Staphylococcus epidermidis; identical to SEQ ID NO: 3875

SEQ ID NO: 8646 - DNA, 675 bp, Staphylococcus epidermidis; identical to SEQ ID NO: 3874

SEQ ID NO: 8647 - DNA, 903 bp, Staphylococcus epidermidis; identical to SEQ ID NO: 6582

SEQ ID NO: 8648 - DNA, 762 bp, Staphylococcus epidermidis; identical to SEQ ID NO: 3872

SEQ ID NO: 8649 - DNA, 1890 bp, Staphylococcus epidermidis; identical to SEQ ID NO: 3871

SEQ ID NO: 8650 - DNA, 648 bp, Staphylococcus epidermidis; identical to SEQ ID NO: 3870

SEQ ID NO: 8651 - DNA, 1011 bp, Staphylococcus epidermidis; identical to SEQ ID NO: 3869

SEQ ID NO: 8652 - DNA, 801 bp, Staphylococcus epidermidis
ttgaaaaagttagcctttgcaattacagccgcttcaggcgcagcagcagttctatcacatcatgatgctgaagcttctacacaacataaggttcaatctggagaatccttatggactattgcacaacaatacaatacttcagtagaaagcattaagcagaataataatcttagcaacaatatggtattcccaggacaagttattaatgtaggtggaagtgcttcgcaaaatactagttcaaacacttcttcaagttcagcatcttcacatactgtagtagcaggtgaatcattaaacatcatagctaataaatatggtgtttcagttgatgcattaatgcaagcaaatcatctaaatggttatttaattatgcctaaccaaatattaactatccctaatggtggttctggttcaggatcaggtggtacagcaactcaaactagcggtaattatacttcaccttcattcaaccatcaaaacttatacactgaaggtcaatgcacatggtatgtgttcgacaaacgttcacaagctggtaaacctatcagtacttactggtctgatgcaaaatactgggcgtcaaatgcagcgaatgatggttatcaagttgataatactccatctgttggtgcaattatgcaaagtacacctggaccatatggtcatgtagcatacgttgaacgtattaatggtgatggtagtattttaatttcagaaatgaattatgcaaatggtccatacaatatgaactatcgtactatcccagcttcagaagtatcttcatatgcatttatccactaa

SEQ ID NO: 8653 - DNA, 660 bp, Staphylococcus epidermidis; identical to SEQ ID NO: 3867

SEQ ID NO: 8654 - DNA, 2175 bp, Staphylococcus epidermidis
atggcaaattcttgtttgcatatactttcaaaaaaagaatatacggcaacacgatgtcaagacggcattttattattttggcctatcgaagggagtatgcactttcaacaatttatgaaagaaaggatactctcagatgagttatatattgtgaataatatggatgtgtttagtatcagtgacaatggcatcacactagaagtatatatttctagtgattggtttacagagttaggctattctttttttaattaccattatatttcggatttaatacaatctaagaacgaaattaaagaactagttgctcaacttacgttgaattttttagataatgatgtggataaagagcaagatattatcaataaaattgttcatattcttgctaatgaggctattattgacaaaaaaattgctgaagaccaatatatgtatgattattatggtgagttaaaggatgaattgaattatatatataatcacatcgaagaaagacttactctaaaagatatttccaataaattatatgtttctaagtccaacctttctacgcagtttcatttgttattaggtatgggatttaaaaaatatatagatacacttaaaattagtaaatctatagagatgctacttacgacaactaaaacgataagccaaattagtgaaacgttaggatttagtaatgtatctacatattctagacaattcaaaaattatttaagtgtaacgcccaatgcatatcgtgcaatgaaaaaatatgataagtacaatggatgttctgatgatgatgtttcagaacacttaaaatcacgtgtacaatcattaatatgttctaaaatgccaacgaatgagttagataattatgatgaaattgttattgaccaatatccaatttctaatgtttcaacgttttattctgtcgttcaaattaattcaattgatgaaattaaaatgttgtttttgcaaggtattcataaaaaaatagggtatgaaggttcaaatattattttttgtattatgcctaacttatgccaatataagaattcgttctctcaagaagagatgaatgatatcattaaaattattattgaatatcgcttgcacgtcgcatttagcatcgataaaatcgagcaaatatatgaacttaatcaactttttacatatcaatatgaaaacttaaaaattatgaataaatgttctgtttcagattacaatgtgcaatttatatttaatttgaacgaaaaaagtattcgagaaatttatcgtaatatcttgaagatacaaaacatcgaattggaatataaaataggtttagatattagttgcatgtttaatgacactgcacaatttaaatcattagcttcgcaaataaagcgtttaaaatttgactatctttatattgataatgctagattaaagtcaccctatttacttgataatgaggaaggtttattactcaaaaatattctacaatttaagcatttaatagatgatttaaagcagtttgattttagtagtgaaaatttaatttttctaaatttatataatcatcaattactgaataataatgaaattgatttaagtaatagcgctccattactatttaaaacgatttcaaaactaaaaaaacattttaaaggctacggattaaatgtattttcaaatcctaaagtctttaacgctgtacatttatttgatgagaatgggtttaaaacaacgtttggactgatttttaatcatttgagttggatgactaatcaaaaccaaattgaacaacgattctataatattattgaaaatgctgatcaatattatctctacttatatgattggcgtgtgattgaaagtgaatctaatgagagcgactttaaagacgttgatatatggattaactttgaagatgaagcgttaatagatgaatatatttgtgtgattgctaaagttgatgatgaaggtggcaatattaatcatatgatttctcaaaacttacgtcacaaatatgtttggtctacaccgttcttgatgagagttgaggagaactttagaccatacatgcacattatggaacatgactttaaaaagggcccattgaaaatcagaatgaaatataatgcagtatatttagttgaaatatataaaaaagataaaataaacaaaaggcgtagcacaacttaa

SEQ ID NO: 8655 - DNA, 360 bp, Staphylococcus epidermidis; identical to SEQ ID NO: 3865

SEQ ID NO: 8656 - DNA, 717 bp, Staphylococcus epidermidis
atgggacgtaaatggaacaacattaaagagaaaaaagcccaaaaagataaaaatactagtagaatatatgccaaatttggtaaagaaatatatgtagctgcaaagtctggtgagcctaatccagagtcaaatcaaactttaagattagtattagaacgtgcaaaaacatattcagtacctaatcatattatagatagagctattgataaagctaaaggcgctggtgacgaaaactacgatcacttaagatatgaaggttttggtccgaatggttcaatgcttatagttgacgcattaacaaacaatgtaaatcgtacagcatcagatgtacgtgctgcgttcggtaagaatggaggaaatatgggagtatctggttcagtagcttatatgtttgaccatactgcaacctttggtgtagaaggtaaatctgtagatgaagtcttagaaacactaatggagcaagatattgatgtaagagatgtaattgatgacaatggcttgactattgtttacgcagaaccagatcaatttgcacaagttcaggatgcattacgtgaagctggcgttgaggaatttaaagtagcagagtttgaaatgttacctcaaactgatattgagttgtctgaagaggatcaagctatttttgaaaaattaatcgatgcacttgaagacttggaagatgttcaaaatgttttccataatgtagatttaaaataa

SEQ ID NO: 8657 - DNA, 477 bp, Staphylococcus epidermidis; identical to SEQ ID NO: 3863

SEQ ID NO: 8658 - DNA, 675 bp, Staphylococcus epidermidis
atgattacaaaagaagatattgttgcagatgttgtaacagattatcctaaaagtgcagatatatttagaaatgctggaatagatttttgttgtggcggacaagagagtatcgcttcagctgtcaatcataaaccaaatattgacttaaattccttattaaataagttgaatcatattgataatacagaaggtaacagtaccattaatcctaaatttttaaatgttgaatctcttatacaatatatacaatcagcttatcacgaaacgcttaaagaagaatttaagaatcttacaccttacatgactaaattggcaaaagtacatggtcctagtcacccatacttattaaaattacaagacttatatcgcgagtttcgtgatagtatgttggatcatatacgtaaagaagatgaggaagattttcctaaactcattcaatatagtcaaggacaagatgtacaaaacattaaaatcatattagaagatttaattaatgaccacgaagatactgggcaattattaaatgttatgaatcaactaacctctgattatcaaaccccagaagaagcatgtggaacatggaagcttgtttaccaaagattacaaaatatcgaacgtcaaacacaccaacatgtacatcttgaaaaccatgtgttatttaaaaaggtaagttaa

SEQ ID NO: 8659 - DNA, 1146 bp, Staphylococcus epidermidis
atgctaactgaaaaagagcaagatattatcaaacaaactgtaccattattacaagataaaggaactgagattacttcaattttttatcctaagatgtttgaggctaacccagaattattaaacatgtttaaccaaacaaaccaaaagaaaggtatgcaatctgctgcattagcacaagcagtactagctgcagcaatgaatattaataatttaggtgcaattaagccagcaattatgcctgtggcacataagcactgtgctttacaagtttatcccgaacattatccaattgtaggtgaaaatttacttgctgcaattcaagatgtgacagggttagaaagtgacgacccagtaattcaaacatgggcaaaagcgtatggagaaattgcagatgtatttatcaaattagagcaagaaatttacaaccatatgttatggaaaggttttaaaccatttaaaatcacaaacattacacaagaaacaagtgacatcaaatctttcacagttgaatctgaagaatatgatttaagtcaattcgaaccaggtcaatacattaccgtagatgtttctagtgaaaagttaccatatagagctaaacgtcattattcaatcatagatggagatgaaaatcacttagtatttggtgtcaaacgtgatgtgactactgaacatgaaggtgaagtttcaacaattttacatgatgaaatatcagaaggtgacatgattaatttatctgctcctgtaggtggcttttcaatagaaaatactgaaagaccgcaattgtttattggttctggcgtaggtatgacaccattagtttcaatgtttaaaaaagctgcatcattaaacgttccaactcaaatgattcaagcggttgtgacagaagatgaacgaccatttgctcaaaaacttgatagcattacagataattatgagcaagcacagctacatttacacgtgaaagataaagaaggttatttagaagctaaagaattagaacaatatttaagtgaacagcctgaaatttatatttgtggtggtacgaaattcttacattcaattataaattctcttaaagaattaaattatgatatgaatcatgttcattttgaaacatttattcctcgtttaagtgttcaagtatag

SEQ ID NO: 8660 - DNA, 186 bp, Staphylococcus epidermidis; identical to SEQ ID NO: 3860

SEQ ID NO: 8661 - DNA, 594 bp, Staphylococcus epidermidis; identical to SEQ ID NO: 3859

SEQ ID NO: 8662 - DNA, 855 bp, Staphylococcus epidermidis
atgaaaatagatgattatcgtttgctcattactttagatgagacaaaaactttacgcaaagcagcagaaattctatatatttctcaacctgcagttactcaacgtttaaaggcaattgaggctgcatttggagttgagatttttattcgtacaaaaaaacagctcattactacgactgaaggttcaatgattattgaacatgcgcgtgatatgctcaaacgtgaacgtttattttttgataaaatacaagcacatattggtgaagtgaacggtacaatttcaatcggttgctcttcgcttattggacaaacattgcttcctgaagtattaagtctttataattcgcaatttcccaatgtggagatacaggttcaagtaggatctactgaacaaataaaagcgcatcatcgagactaccatgtgatgattacacgtggaaataaagtaatgaatttatcgaatacacatttatttaatgatgaacattattttatatatcctaaggatcgtaaggaagatgtaactaaactgccttttattgaatttcaagcggatccaatttatattaaccaaattaaacaatggtataacgatcatttgggacatgattatcacgcgacaatcacagttgatcaagttgccacatgtaaagaaatgttgcttagtggtgtaggggtaactatactaccaaaaattatgatgaaaaatatcgataagaacatgtttgaatttgaaaaagtcactattgataaaaagccacttattcggtcaacatacatgagttatgacgcaagtatgctacaacttcctcaagtagacgcattcgtaaatttaatgttgaactttattagataa

SEQ ID NO: 8663 - DNA, 1209 bp, Staphylococcus epidermidis
atgtttacagcattattgcaaataaagaattataaattgtttgtggtcaatatgttgttactaggtatgggaatagcagtgactgtaccttatttaattttatttgctacaaaagatttggggatgacgacaacacaatatggactgctacttgcacttgctgcgataagtcagtttatagtcaattccattattgcaagattttctgatacacatcatcttaatagaaagattctaatcatcactgctttgtttatgggggcagtgagcttctcaatttatttctacgttcatcaaatatggttattcatcgtgttatatgcgttgtttcaaggattatttgcaccagcaatgccacaattgtatgcctctgccagagaatcaatcaatgcttcaagttcacgtgatcgtgctaagtttgctaatactgttttacgttcaatgttttcacttggttttttatttgggccatttataggtgcacaacttattgagttaaaaggttattctggattatttggtggcacaatagctattattttatttactttaattttacaagtgtttttttataaaaatttaccggtaaaaaatcaaatttctgaacaacagcatattgagaaaatcgcaccaaatatgtttaaagataaatcattatttattccatttatagcgtttatattacttcatattgggcaatggatgtatacgatgaatatgccactttttgtgacagattatttaaatgaaaaggaaagatatgtaggctatttagcaagtttatgtgcaggtttagaagtgccgtttatggttatattaggtatattatcagctaaattgccaactcgaactttattgataattggttctgtatttggtggcgcattttactttagtattggtgtatttaaaaattttcatatgatgcttgttggacaaatatgtttagccatctttctagcaatattactaggtcttgggattagttattttcaagatattcttcctgattttccaggttatgcatcaacactttttgccaatgccatggtaataggacaacttggtggtaatttgctaggtggtgtgatgagtcattgggttggtttggaaaatgtattctttgtctcagcaagttctatcttcgtagggatgatactcatcttgtttacgaaagatcaaaaaattacaatagaagatgtggagtag

SEQ ID NO: 8664 - DNA, 489 bp, Staphylococcus epidermidis
atgacagcgatattatggattttaattattatagcctttgcgttagcatttattggtttaattaaaccggtgataccatcacttttaatgttatggattggttttttaatttatcaatttggttttcatgagggaagattatcgtggattttttatgttgcaatgattatctttaccattatgatattagtagccgattttgtgatgaataaatatttcgtcaatcgctttggaggaagtaaaataggtgaatacacagcgctcataggtgtgattgtaggttgtttcgtttttcctccctttggtattatcattattccttttgttgctgtgttcattgttgaattggttcaagggtttaactttcaacaagctataaaggtgagttttggctcagtgattgcatttttagcgagtacaattgctcaaggtctaataatgattgtaatggttatttggttctttttagatgtctttctaataaattaa

SEQ ID NO: 8665 - DNA, 690 bp, Staphylococcus epidermidis; identical to SEQ ID NO: 3855

SEQ ID NO: 8666 - DNA, 423 bp, Staphylococcus epidermidis
atgagaaaatggttaaccttactattaattacaacattggtgttaactgcatgtggtaaaagtaacgaaaaagcttctttagaaaaaagcattgatcagttgaaaaaagaaaataaggatttaaaaaaacagaagaaaaagttacaagagcaaaaggataagcttaaacacaaacaggatagtctccaagaagatgtaaatgacttgcctgctaaaagaacatcccgagataagaaaaataaagataatcatgatgcaaaagaaaagtcttcagataatcaatcgacatctgctaatcatgatgatcaaactaacaaaataaaaagcaatcaagatgaacatgacagtcaatcctctaaaccacatacacagcagaagccctcacagaatgatagaaaaaataatcatcgacaagaacgatag

SEQ ID NO: 8667 - DNA, 297 bp, Staphylococcus epidermidis; identical to SEQ ID NO: 3853

SEQ ID NO: 8668 - DNA, 549 bp, Staphylococcus epidermidis
atggttatttatattgaaactgaacgtttaaacttaagagattgggaaaccaaagatttattaccttttcaaaaaatgaatgctaatacgcaagtacgtagatacttccctagtttacttagttatcgtcgttctgagatagacatggaaaatatggatagcataatacaagagagtggcctaggtttatttgctgtagagttgaaagagacgggagaatggttagggtttataggtgtgaattacgtttcaaaagatagccattacccttttaaagagttaccgttttatgaaataggttggaggctaattccagaagtatggggaaatggtctagctacagaaggggcagaagccgtaatgaaatatgctagagataaaggaattaaagaattatatagttttacttctgaaaataatttgccttctagaaaagtcatggaaaaattaggaatgacttttttagacaattttgaatatccgaatcttagtaaataccatccccttaaacgtcatgtaagatattataaagagctacttccttcttga

SEQ ID NO: 8669 - DNA, 567 bp, Staphylococcus epidermidis
atgaaaagaattgctgtttattgtggtgcaagtaaagggaaaaacccatcttatgttaaagaggcatacgaattaggaaaatatatggctgaacaaggatacgagcttgtattcggagcaggatcagtcggcattatgggagctattcaagatggcgtacttgagcatggcggtaaagctatcggtgtcatgcctaaaatgttagatgaacgagaaataacaagccaaaaagtaagtgagcttatattagtagattctatgcatgaacgaaaaaataaaatgactgaacttgccgatgcttttattatggctccaggcggtgctggttcattagaagaattttttgaaatgtatagttgggctcaaattggtatacaccaaaagcctataggtgtatttaatttaaatggattctttgagccactacaacacttaatcgaccatatgattaaagaaggatttattgatgagaaatatcaaaagcttgcacctttatatgatactaaagaatcactcatcgaaggacttaaacattacaaaccacttggtgtacgtacatacgattaa

SEQ ID NO: 8670 - DNA, 450 bp, Staphylococcus epidermidis
atgaagactaacgtaattatagatggagatgcttgtcctgttgttaattctgtcattgaattgacgaaagggacaggcatttttgttacaattttaagaagttttagccatttttcacaacaaatacaacccgaacatgtaaaaattgtatacgttgatgacggtcccgatgcggtagactataaaatagtcgaacttgctagcaataatgatatcgtcatcacacaagattatggacttgctagtctactgatagacaaagtacatactgtcatgcatcataaaggaaatatttatcactcaaacaacatccaaagcttattagatcaaagatatctaaatgctcaaataagaagacgaggtggtcgtcacaaaggccctcctcccttcacaacagaggatagacttaaattcgagcatgcttttagaaaaatcattaatcaaatatag

SEQ ID NO: 8671 - DNA, 681 bp, Staphylococcus epidermidis
atggacaaaaagaaactcattaaaacacttatcaatgtattaccaatcgttatcgtaccattagtaactgaacgtaagcgtattaaagaacatccagatgtacagaaagtaactaatgctacatctaaagctacttcaaaaacaacttctgcaatttcaaataaagcttcagatatcaaagagtacgtaggagataaaaagcaagaatttgataataagcgtgaattgaagaaaattgcgaaggaaaatgatccagcctacattgagaaaaaaggcgaaaaattagctaaacaaaatcgtaaagaagcagacaaaatggacaaaaagcttcaaaagaatattgagaaacgtcataaagaagaacaaaaacaacgtgaagctaatcagaaacaacgtattaaagacatgaaaaaaactcaaaaatacgaagagcaagttggcttaactcctggtaaaatagatcacgaaattgagaaaaaaggcgaaaaactagaaaaagataatcgtaaagatattaaaaaattagataaaaagcttcaaaagaatattgaaaaacgtcataaagaagaacaaaaacagcgtgaagaagcagagaaagctagaaaaaaagaatttaaaaaatatgaaaattacgtggctgacagtgtcgtaaaacaacataaggaatcaaatcattcttaa

SEQ ID NO: 8672 - DNA, 465 bp, Staphylococcus epidermidis
atgaaatataagattgaaaaattggatgacagtagcgtcgtttatatgagaatgataggtacttatcaaagtgataaaaactttgaaatgatgaagacttttaagcattggattcagactaatcattattggaaatatgttgagaaatacggtgtgttaggtatagcattagataatcctctccacgttcaaagtaatcaatgtagatatgacgttgttttgagaatagatgaaacagtaaataatcagacaatatctaaaagagattttacaggtggcatatatgctgtgtttaaagttagtcatacaaaaataaatatagagaagttctttagcaatttagaaaatattttaaatgaaagtcatttgcgtatgagaaatgaaccaattatagagagatacattgaagaagagggaacagataaagtgtgtgaaatgttagggcctatctatgaagtaaattaa

SEQ ID NO: 8673 - DNA, 873 bp, Staphylococcus epidermidis; identical to SEQ ID NO: 3847

SEQ ID NO: 8674 - DNA, 1635 bp, Staphylococcus epidermidis
gtgaaaaaactaacaaaaatggttttaagttataaattataccccgcactcatgttaatcatgagcgtttttttatcttttacggtcgttgcgcaaaacatttcaatttcacactttttaaatcacttactgtattatcaacaacaatctttattattattgttatcagttatttttatctcccttattttaagagcaacatttaatatgctgattcaatttttaggagatcatttggcatttaaagtaaaacatatgcttagagaacaagtgattttgaaaaaaagtgtccgttcaattggtgaagaaataaatattttaactgaaagtattgatggtatcggtccgttctttcagagttatttacctcaagtctttaaatcaatgttgattcccatcgttattattattaccatgtgttttgttcatttacctactgctattattatggtaattaccgcaccttttattccattgttttatgttatttttggacttaaaacaagagatgagtcaaaggatcaaatgacatatttaaaccagtttagtcaacgttttttaaatacagctaaaggtcttattacatttaaacttttaaatcaaacgaaacaatctgagcaacaactttataaagacagtacacgttttagagatttaacaatgcgtattttgaaaagtgcctttttatcaggacttatgcttgagttcataagtatgttagggattggattggtcgcattggaagcggctttaagcttagttgtatttaaccatatcaactttgtgactgcagcgattgcgattattttagctcctgaattttataatgcgattaaagatgtaggtcaagcatttcatacaggtaagcaaagtgaaggtgctagcgatgtggtgttttcatttttagaatctgaagataaagctgattctcctacattaaaagtggatgagcaacagtttgaacaagttttaattaagcatgttgattttcaatacgctaatagtaatcatatggctttgaaaaacatttctttttcggtaaataaaggagaaaaggtcgctattgtgggaccgagtggtgcagggaaatccactttagctaagttgcttagtcaatcagtaacacctacacatggaacactttcatttaaccaagcatcattaaatatcggatttctaagtcagcacccacatatatttgcagattctatcaaaaataatattgaaatgtatgatgatgagatatgtgatgagcaagtgattcaagtgcttgatgaagtggggttaaaagagaaagtactttcattaaaatatggtatctatacttctattggtgaaggtggggaaatgttatcaggtggacaaatgagacgtattgagttaagtcgtttattattattgaaaccagatattgttatttttgatgaaccagcgataggattagatattgaaactgaaaaggtcatacaacaagtgttagagcatcatttttctacaacgacagtgtttattattgcacaccgtgattcaaccattcgaagttcagcacggcgtatttatctcgaaagtggtcatcttataaaagatgattcgataatttctgttacgcgtagtgaggtgaagatagatcaatga

SEQ ID NO: 8675 - DNA, 1695 bp, Staphylococcus epidermidis
atgaaatcacatattcattttagtatagatagagatttaatatgcgctatcatggtaggtgttttaggcggaattgtaacattagcaatgttctttttaagtggttatatgattactcaaagtgcgctaggtgcgccactctatgcattaatgattttagttgtatctgttaaattgtttggttttttaagagcaattacacgctatatagaaagattactttcacacaagacgacatttacaatgttacgtaatgtacgagttcaatttttaaaaatgctatatccagtcgttccagatatctatagaagatttaattcaagtgatcttattacaaaaatgataagccgtgtagaagctttacaaaacatatatctgagagtatattacccaccgattgtaatcggattaactgcaattgtttcagtaatgactatgttgtttttatctccactacatgcattagtgattactttaagtatgttattaactttatggattgttccttggttaagtgctaagaaagcacgtaaattaaagcaacaagtgacccaaacgcaaaaaacatttcttaaaagatattatgattataaagaaggtcatgaagaattaaaacgtttcaatcgcagcgatgacttcaaaaatacagtttcccagtctttacgacaatttgatgatatgcaacttaaggaacgccgatttctttctatttatgactacttgttaaacttaattgcgatgttctcaatatttatgtgtttaatgttaggtgcgcaacagattcatgatggtcagctcaatgctatttatattacaagtattatattgatgatattaactttatttgaacaagcagtacctatgagcaatgtggcatattataaagcagatacagacctggcacttgaagagatacacgaggtaattgtacctaagtataaaattccttcagaacatacaaacttaaagcgttcgcaaaatcttttattagaaattaaaaatgtcacatttaaatatgaacatcaacatcattctactttaaaacagattaatctaaccattgaatatggtgataaggtggcaatcatcggtccttcaggatcaggtaaaagtactttacttcatgtattacttgggctatatcaaatagaagaaggagaagtgagattaaatggtaaggatatgaacagtatcaatgacaatgataaatatcaaacatttaatgcaatgcttcaatctcaatatatttttgatggttcaattcgtgataatttattttctgagcaatcagatgataacctcaaaaaggttctcgaagatgttggattagaatatttaaatttagatagtatagttacgttagacggtcataatttatcaggtggggaagctcaacgtctaagtttagcgagattgctattaagaccttcggccggtttttggatattagatgaacctactacagcactagatattaataatacccaaaaaattataaatttgattgaatccttatcccaaacactcatcatagctacacatgatttagaaatacttccaagatttaataaaattatagtcatgaatgacggagaaataatagaaaatggttcatatcaagaattaatgcagcatgacggttatttaaaaaaagtaatagaaatgaatggaaacgaaatgaaattttttaattaa

SEQ ID NO: 8676 - DNA, 444 bp, Staphylococcus epidermidis; identical to SEQ ID NO: 3844

SEQ ID NO: 8677 - DNA, 927 bp, Staphylococcus epidermidis
atgaaaaataataaaaatgaaaagttgaaaatcacaatcgttagcggtttcttaggcagtggtaaaactacgttcctgacacattatattaatgaattattaaaaattgatgagaaaataacagtaattatgaacgaatttggatcatttgatgtagatggtaaccatttgagtgaattagtcaaagtgtatccattgttgaacggttgtgtttgttgtgatatgaaatcagatttagttcaacaaattgagatgctcagtcacaaccatgaaacggaccatattataatagaagcaactggtatcgcgcatcctattgaattgattatggcgtgtcaagatcctcgcatagttcagtttgttgaacgtccccacgttgttagtattgttgatgcacctcgctttttacaaagacaacagtatactgactccacaaagcgtctcatggaagaacaactcgaggtaagcgatgtgctcgtcgttaataaattagatttaatatctgttgaagacagagatgctttaaagaaccaacttaacgaagtaaacaaatatagttcaaaaatatatactacttatggacaagttaatatcgaggagttgtcacaatttcgtgatcaattagtaatgacacacacacattctcatcaccatggtataaatagtatgcaatacacatttacaacagctattgaccgacaattattttaccaatttattttgcgtatgcctgataatgttttaagattaaagggatatgtacaatttaaagatgaacccaatgtgacatatgagtttcaatattcatttggtatgccggattatgaagttattaatggggattatccgttaacaatagtattgattggtgaacaacttgatgttaacagactaaaaaataaactcgatgttttgcaattctcataa

SEQ ID NO: 8678 - DNA, 294 bp, Staphylococcus epidermidis
atgaatgaagataaccgtaacaaacaaattaaatttgaaagaaacctaatcacttttccatatttaggttttgcctttattgttttattatttaatattttttatactgatgtaaaaattacaatggtcttatttggtttattctttgcttacaatttaggaatgctttttatagccttcataagacattttaaacgtacacttatattaaccttaatactaacaatattaagtggtatagcattttttgtactactttatgtttttggattaaatcacgatatttttggatag

SEQ ID NO: 8679 - DNA, 942 bp, Staphylococcus epidermidis
atggtcaatagaagaaagatatcaattattggcgcgggacatacaggggggactctagcattcattcttgcacaaaaggaattaggagatattgtgttgattgaacgccagcaatcagagggtatggctaaaggaaaggcgttagatattttagaaagcggacccatttgggggtttgacacatctgtacatggttcagtaaatatagaagatattaaagattcagacatagtggtgatgactgcaggtatacctaggaaatcaggaatgacaagagaagaattagttcaaactaatgaacaaatagtacgagaaactgcattacaaattgcaacatatgcacctcattcaataattattgtattgactaatccggttgatgttatgacatatactgcatttaaagcatcaggttttcctaaagaacgtattattggtcaatctggaattttagacgctgcaagatatcgaacttttattgctcaagaatttaacgtgtctgtcaaagatgtaaatgggtttgttttaggtggacatggtgatacgatgttacctttgattaataacacacacattaatgggattccagttaagcatcttatttctgaagaaaagattgatcaaattgttgaacgtacacgtaagggtggtgcagaaattgttgcattactaggtcaaggctcagcatattatgcaccagcaactgctatatatgaaactatagatgcaatttttaatgatcggaaacggttattaccaagtattgcttatctagagggagaatacggttgttcagatatttgtttcggagttcctactataataggatatcaaggaatagaaaagattatagaggtagatatgaataatgatgagtatcaacaactacaacactctgcgcaagctgtgagtgaagtcaaaaactcactaaaattcaaataa

SEQ ID NO: 8680 - DNA, 1557 bp, Staphylococcus epidermidis
atggctaaaggggaccaatatcaagctcatactgaaaaatatcatgataaaaagtctaaaaaaagttataaacctgtgtggattatcattagttttattattttaattacaatcttgttattacccacaccagcaggattacctgtaatggctaaagcagcactagctattttagctttcgctgtagttatgtgggttacagaagcagttacttatccagtttctgcaacattaattttaggattaatgatacttttactaggtttaagtccagttcaagatttatccgaaaaacttggaaaccctaaaagtggcgacataatactaaaaggtagcgatattttaggaacgaataacgcgcttagtcacgcttttagtggtttttcaacctcagccgtagcacttgtagctgcagcattatttttagcagtagctatgcaggaaaccaatttacataaacgacttgcattacttgtgctatcaattgttggaaataaaactagaaatatagtcattggtgctattttagtatctattgttctagcattctttgtaccatcagctacagcacgtgctggtgcagttgtcccaatattactgggaatgattgctgcatttaatgtgagtaaggatagtagacttgcttcattattaattattactgctgtacaagcagtttcgatatggaatataggtattaaaacggctgcagcacaaaatattgtagccatcaattttattaaccaaaatttaggacatgatgtatcatggggagagtggtttttatatgctgcgccgtggtcaatcattatgtctatagctctttattttataatgattaagtttatgccacctgaacatgatgcaattgaaggtggaaaagagttaattaaaaaggaacttaataaattaggaccagtcagtcatagagaatggcgactaattgtgatttcagtgcttttattattcttctggtcgactgagaaagtattgcatccgattgattcagcttcgattacactagttgctctaggtattatgctaatgccaaagattggtgttattacttggaaaggtgttgaaaagaagattccttgggggacgattatagtatttggtgtaggaatctcacttggtaatgtattacttaaaacaggagccgctcaatggttaagtgatcaaacatttggtttgatgggtcttaaacatttaccgatcatagcaactattgcgttaattaccttatttaatatattaatacatttaggttttgcaagtgcaacgagcttagcctctgcgttaatacctgtgtttatttctttgacttcaacgctaaatttaggtgatcatgctattggttttgtattaatacaacaatttgtgattagttttggtttcctactacctgtcagtgcaccacaaaatatgcttgcatatggtactgggacttttaccgtaaaggattttttaaagacaggtatacctttaacgatagtaggttatattttagttatcgtatttagtttgacgtattggaaatggcttggtttagtgtaa

SEQ ID NO: 8681 - DNA, 1374 bp, Staphylococcus epidermidis
atggctataggtgtcatattaaatagagtttttaggctaaataataatccattatttgattatatatatagtaataaagaatctataaatcattgttattttattattccaactgaagagtttgaagaagaagcaaaaaagaaagcacaatactattatgggtccatacagaagtttatgtatgaactacaacgatatgatatagaaccctttttgatgtcttatgataaattaatagacttttgtaaaaaacaagctatagacaaagttgttgttgcaggtgatattatgagttatcatcacgaagaatatgacattttacatcaaaggaaacgatttaaacaagctaatattcaagtaatatcattaagagcaaatcattattttaacccccgcaaaacacataataaacaaggggaaccatataaagtatttaccagtttttatagaaaatggcgtccttacttaatgattagagatgaatatgactatcatttagaagatatttcaaaggttgtagtgaaatctcaacataaaattaaagaagattatcattcatatggtataagtgaacgtgatgttcaaaatcgttggtctgaatttttatctcaagatatcgaaaattataaagaaaacagggaatacttgcctgaagtattaacaagccaactaagtatttacttagcttatggaatgatagatattatacaagttttcaacgatttacttcaaaattatgataaaaatgaacaaaattacgaaacttttatacgtgaattgatttttagagagttttattatgtattaatgaccaattatcccgaaacagctcatgttgcttttaaagaaaaataccaacaattgaaatggttttataatgaagagaattttaaactgtggaaagatgggaatactggttttccaattattgatgcagcaatggaggaacttaaaacaactggatttatgcataatcgcatgagaatggtagtttctcaatttttaactaaagatttgtttattgactggatttggggtgagtcatttttcaaacaaaaattaatagattatgatgcagcttcaaatgttcacggatggcagtggtcagcttctactggaacagatgctgtaccatactttagaatgtttaatcctataagacaaagcgagcgttttgataataatgcacgatatataaaaacttacattccaagattaaatcaggtagatgctaagtatttacacgatactcataaatttgagcaacaaataaaggggcaaggtgttgaaataggtaaagactatcctaaacaaatgattgatcacaaagaaagtagacaacgtgtaatgtcagaattcaaagcattagattaa

SEQ ID NO: 8682 - DNA, 618 bp, Staphylococcus epidermidis
atgcaatctcgttactttgcaagaatatacttcattatcttatttgttatatctatgactgaatcacatatttttaattttatgacgttaaatttatttttagcatacgtgccgtttgaactttgtctacttttaaaattgttcaaaccagtcaaagcttttgaatggcccttatttattgttttcggactcatatttctattattagttccaaacacattttatatgattaccgatctcatacacttaaaccaatttcaatttaactttttagctggattaaacatcacagaatggatttatttcacctatttaatacttggcgtactcttagcaatatacctcacaattcttatatttttagaaattgcacattttacgtcttatgtatggttaaatcgactattgatagttatattaatgttcttaaatggattaggtatttacatcggtcgattcttaagattacatactgtctatttattaaatgcacctttaaaaattgtgaaagaggtttttttaatcatagatgttaaagcgttactatttgtcgttttaatggtgctcatacaagcaacagtcatattgtttattaaaggggtgagattataccaatga

SEQ ID NO: 8683 - DNA, 138 bp, Staphylococcus epidermidis; identical to SEQ ID NO: 3837

SEQ ID NO: 8684 - DNA, 1164 bp, Staphylococcus epidermidis
atgaaaaaacaattattcattctttattttaatatatttcttatatttttagggattggattagttattcctgtacttcctgtatatttgaaggatttaggattaaaaggtagtgacttaggaatgctagttgctgcttttgcattatcacaaatgattatatcaccatttggtgggacactagctgataaattgggtaaaaaattaattatatgtatcggtttagtattctttgctgtctctgaatttatgttcgcagccggtcaaagttttaccattttaatcatttcacgtgttttaggtggctttagtgcaggcatggtcatgcctggtgtaacaggtatgattgcagatatttctccaggagctgataaagctaaaaactttggttacatgtcggcaattattaattcaggttttatattaggacctggatttggaggctttttagctgaaatttcacatagattacctttctatgttgctggaacattaggtgttgttgcattcattatgtcagttttattaattcataatcctcaaaaagcaactacagatggattccaccaatatcaacctgaattattcactaaaattaattggaaagtatttattactccagtcatattaacacttgtattagcatttggtttatctgcttttgaaacattattttctttatatacagctgacaaagtaaattatactcctaaagatatttcgatagctattatcggtggaggcgtgtttggcgcattattccaagtattcttctttgataaatttatgaaatatatgagtgaacttaattttattgcatggtcattactatattcagccattgttctcgttatgttagtgcttgcaaacggttattggacgattatgattattagctttgttgtttttataggttttgatatgattagaccagctttaaccaattacttctcgaatatagcaggcaaacggcaaggttttgcaggtggattgaattcaacttttaccagtatgggtaactttataggtcctcttgtagctggtgcattattcgatgttaatttagagtttcctttatatatggctattgcggtttcattaagtggaattatcattatttttattgaaaaaggacttaagtcacgccgtaaagaagcaaattaa

SEQ ID NO: 8685 - DNA, 465 bp, Staphylococcus epidermidis
ttgaaaaacttatttttaagttctgttgcagttattttatcaatttgtttagtacttttattatttttagctacaaaccaaaatgcattagcgaaagtccataaaacaatttgtacttttactaaagtgaaaacagtatctcataacgatatattccctaacttaaatatgaatcatgttgctgaagcttcagaaaaaaactctgatcaccaaaagaatgttaataaaacaaatcaacaaagtgtaagaacgcaagcatcttatgatttcaacccacaggaatgtaaagtaattgctttgaattacgctgagaatcatttaagcaaaaaatataatatagagcgtactttcaacgagtcgcttcattcagtatatgtattttctagtgaaaataaacttcatcaaactaaggttaaagtcaataaaagtgggactgtacatgcatcaaacatcaataatcattaa

SEQ ID NO: 8686 - DNA, 507 bp, Staphylococcus epidermidis
atgattgttataaagggtgagaatatgtctaaaactaaaaaaacaaatgcaatgcggattttagatagagctaaaattaattatcaaatgaatacttacgaagttactgacaagcatcaacatggagaagagattgcacaactcgtaggtgctaaaatagaagaagtctttaaaacacttgtactagagaattccaatcatgaacactatgtttttgtcattccagttaatgaaaccttagatatgaagaaggcggctcatgttgttaatgaaaagaaattgaatttaatgcctctcgatcaattaaaacaagtaacagggtatgttagaggaggatgttcacctatcggtatgaaacattcctttaaaacgacgattgatgcttccgctaaaaatttagaaaaagtttatattagcggaggtcaaagaggaatgcaaattatcattcatgtgaatgatttaattgacatgacaaaggctcaggtagaatctattacacagaattaa

SEQ ID NO: 8687 - DNA, 759 bp, Staphylococcus epidermidis
gtgatatcagaaaaacgacagaatttaattttacaagaattaactaaaaaggactttttaacacttcaagatttagttgatagaacaggatgtagtgcatcaactatacgaagagatttatctaagttgcagaatatgggtaaattacaacgagtacatggtggtgctacaattcatcaaaatcgagttaaggaacctaagttatctgaaaaaagaactcagaatttacgtgaaaaacaagaaatcgctaaacgtgctgcatgtgatatccaagatcatgaatgtatatttctagatgcgggttcctcaacttttgagttaattcaatatattgaggcaaaagatattactgttgtaacaaacggaatgacacatgttgaagaactattaaagcacggtattaaaactttaatggttggtggccaagttaaacctacgacaatggctacagttggtgctaacgcgttagaaacattaagacgttattgttttgatcgtgcttttataggaatgaacggtattgatgtgaaatatggattaacaacccctgatgaacaagaagctttgattaaagaaacagctatgaaactatcaaatcacaaatatgtgcttgtcgatcaatcaaagtttaatcaaatttattttgcaagagttccaattttagatggacttaacatcataacttcgcaaaaggcaatgcaaagcaagatgactgaagcttacatgaatgaatttaattttataggagggagatcatga

SEQ ID NO: 8688 - DNA, 921 bp, Staphylococcus epidermidis
atgatatatacagttaccttcaatccttcaatcgattacatcatttttactgatggatttgaaatatcaggattaaaccgggcaaaagcaacgtataaatttgcaggaggtaagggaatcaatgtatcaagagtacttaaaactttagatgttgattctacagccttaggattttcaggaggtttccctggagattttattgctcaaacacttgaggacagtaatatccaatcagattttgttcaagtagatgaggatacgcgtattaatgtaaaactaaaatcaggtcaagaaacagaaatcaatgcacccggacctaaagtgacacacgcgcaatttgaacaacttttatctcaaatacgtcgtactacaaacaacgatattgttattgtagctggaagtgtaccgaacagtattccaagtgatgcttatgcacaaatagcacaaatcattgaaaaaactggtgcgcaactagttgttgatgcagaaaaagatcttgttgaaacagtattaccatatcgaccattatttattaaaccaaacaaagatgaattagaagtaatgtttaacactacagtcaagagtgatgaagatgttataaaatatggtaaagaaattttgaaaaaaggggcacaatcagtcatcatttcacttggtggcgatggtgcaatatatgttgatcaacatcaaagcattaaagctgtgaatccacaaggacatgtagttaatacagtaggatctggtgatagtacagtggcaggtatggtagcagggttgtccatgggtcttaatgtagatgaagcttttcaacaggccgtagcttcaggaacagcgactgctttttcagaagatttagcgacaagagatgctatagaaaatattaaatctcaagtgacaatttctgtacttgatggggagtga

SEQ ID NO: 8689 - DNA, 1953 bp, Staphylococcus epidermidis
atgagaattactgaactgttaactaaagaaacaatagcgatggatttagatgcttctgataaaagtggggtgattactgagcttgttaatcaattggataaagcaggtaagttaagtgaccctgtatcgtttaaagaggcaattcataatcgtgaatctcagagcacaacaggaattggtgaaggtattgctataccacatgctaaagttgcagcagttaaaacacctgcaattgcattcggtaaatctaaagaaggtgtggattatcaaagtttagacatgcaacctgcacacttattctttatgattgcagcgcctgaaggtggagcacaaacgcatttagatgcgcttgcgaaactttctggaatattaatggatgagaaaatacgtgaaaaattaattcatgctgaatctcctgaagaagtgttaaacattatcgatgaagcggatgatgaggcaacaaaagaagaagaagcagaagcgaacgaaaatgcaactgtttcaactgacaactcaaatcaagataataatgagccatatgttttagctgttacagcatgcccaactgggattgcccacacatatatggcacgtgatgctttgaaaaagcaagctgagaagatgaacatcaaaattaaagttgaaacaaatggttctagtggtattaaaaaccgtttaactgaacaagatatagaacgtgcaactggaataattgttgcagcagatgtccatgtagaaactgatcgttttgatgggaaaaatgtggttgaggttcctgttgctgatggtattaagcgtcccgaggaactaattaatacagctttagatacaaatcgtaaaccatttgtagcgcaaggtggatctaaaaaacatgacgataatgaagaaaagttaagtccaggaaaggcattctataaacacttaatgaatggtgtttctaatatgttaccacttgttatttcgggtggtatcttaatggcaattgtattcttattcggtgcaaactcatttaagcctgatagttcagaatataatgcatttgctgaacaattatggaatattggtaaaaatagtgcctttgctttaattattccaattttagctggtttcattgcacgtagtattgcagataaaccaggttttgcagctggtttagttggtggtatgttagctatttctggaggttctggctttattggtggaattattgctggtttcttagcaggttatttaactcaaggaattaaatatattacacgtaaattgccacaagcaattgaaggcttgaaacctactttaatctatccattactttcagtttcaattactggattgttaatggtgtatgtctttaatccgccagcagcttggttaaatcatttgctactaaatggtttaaatagtctgtcaggctctaatattatgttacttggtcttgtgattggagctatgatggcaattgacatgggcggtccatttaataaagcagcttatgtatttgctactgctgcattaacggaaggaaatgcagctcctattactgcagcgatgattggtggtatgattcctccattagctatcgctacagcaatgttaatctttagaagaaaattcactaaagagcaaagaggctcaattgtaccaaactatgtcatgggattatcatttattactgaaggtgccatcccattcgcagctgccgatccattacgtgtgattccttcaatgatggttggctcaggtgtggctggagcaattgctttaggtttaggatcaagtatcaaagcacctcatggtggaattttcgtcattattggtactgattttaaccatatacttcaaactcttattgctttagttgtgggtacgttagtttcagctttaatttatggtttcttgaaaccaaaagtaacagaaaatgaaattcaagcatctcaagctatggatgaatag

SEQ ID NO: 8690 - DNA, 1173 bp, Staphylococcus epidermidis
atgtcagaatatgttttaacgaatggcatcgtatatacagaaaatgaaatgattaacaatggatatgttcatattaaagatgggaaaattttagacgttggtaagtgtccttttcatccgtcatcgtcgcataatacaattgacattattgatgtaaaaaaacgacatatactgccaggatttatagatattcacatccatggggggtatggtgaagatgccatggatgcatctgaacaaggcttacaacatttagcagaatcactcctttctgaggggacaacatcttttttagcaacaacaatgacacagtcaacagtcaatattgagcgagcacttcaaactattgctaaatatactcaacaacaagatgttacaaatgctgccgaaattgtgggagtacatcttgaaggtccatttatttcagaacataaagtaggcgcacaacatcctcaattcgtacaacgtcctacagttgataaaataaagtcgtttcaggaagtagcgaatggactaattaagattattacgtacgctcctgaagttgatggagcaacagaaacgttaaagacaatgaaaaatgatatcattttttcaatcggacatacggtggcaacgtttgatcaagcgaatacagctgtgagtcatggtgccaaacacatcactcatttgtataatgcagcgaccggctttcaacatagagaaccgggtgtatttggtgcagcctggttaaatcaagggttgcatactgaaatgattgtggatggtgttcattcacatcctgcatccatcgcacttgcatatagacttaaggggaatcaaagctgttatttaattacagatgcgatgagagctaaaggaatgccagaaggacattatgatttaggtggtcaggatgtgattgtaaagggaagtgaagcacgcctgtcttctggggctttagctggaagtatactcaaaatgaacgaaggacttaaaaatttaatacaatttacaggtgacacgattgagcatttatggagagtaacaagtttaaatcaagcgataacattaggcatagacgacataaaaggtagtattaaaatcgggaaagatgcagatattgttatcatagatgatgcatgtaatgttgaaacgacgattaaaaatggaaaatatcatgctttcaaatga

SEQ ID NO: 8691 - DNA, 1308 bp, Staphylococcus epidermidis; identical to SEQ ID NO: 6234

SEQ ID NO: 8692 - DNA, 840 bp, Staphylococcus epidermidis; identical to SEQ ID NO: 6233

SEQ ID NO: 8693 - DNA, 1107 bp, Staphylococcus epidermidis; identical to SEQ ID NO: 3827

SEQ ID NO: 8694 - DNA, 948 bp, Staphylococcus epidermidis; identical to SEQ ID NO: 6231

SEQ ID NO: 8695 - DNA, 690 bp, Staphylococcus epidermidis; identical to SEQ ID NO: 6230

SEQ ID NO: 8696 - DNA, 474 bp, Staphylococcus epidermidis
atgaagaaaataagtttatttataatatttttaattcgtgtaatttcaggtattgttattttcagacaaggatgggagaaatttacaggtgattttacattaaacgggctagttccggtaattagagataacacagactctcctcaatggtataaatggttttttgaacatattgttgcacacacaacaggattatttaatataatcgtacctttaggggaaatggcaattggtttaggtttaattttaggtatatttgcatacgctgcaagtttctttggagccttcgttatgataaattatattttagcagatatgatttttacgtaccctctacaattagctttctttattattttactcatgagccactctttattggctaaggtatcacttaaagaaatcatcgcttattttagagaccgtaataaccgaggtgaagataagcatgacccacttactaatcgtggatga

SEQ ID NO: 8697 - DNA, 438 bp, Staphylococcus epidermidis
atgaatacaaaatatttattagcagtcggagcaattgttacatcacttacattaggcgcatgtggaaattctaactcggaaagcgatcacgctaatcacaaagataaacaacaagaagacagtaatgtaaaaacagacacaaccaaaaaattatctggtaattttgaatctaaaaacggagaaaaagtagaaggtaaagctaaaattgaaaatggcaaacttatgttagagaattacaaatcttctaaaggtccagacctatatgtttacctaactaaaaacggagatattaaatccggtaaaaagatttcaacagtagactacaataaatccaaacaaacttttgatttaaaaaatgtagatttagaaaaatacaatgaagtaacaatttattgcgaaaaagcacatgtaatttttggtggcgctaaattaaaataa

SEQ ID NO: 8698 - DNA, 156 bp, Staphylococcus epidermidis; identical to SEQ ID NO: 6227

SEQ ID NO: 8699 - DNA, 600 bp, Staphylococcus epidermidis; identical to SEQ ID NO: 6438

SEQ ID NO: 8700 - DNA, 714 bp, Staphylococcus epidermidis
atggctaaaatacccgttttagaaatatttggaccaacgattcaaggtgaaggtcgtgtaataggaagaaaaacaatgtttgtgcgtacagctggttgtgattatcgatgtagctggtgtgattctgcatttacttgggacggtagtgctaaagaagatatcaaattaatgactgctgaagaaatttatgatgcgttacttgaaataggtggtcatcgatttaatcacgtaactatatccggaggtaaccctgcgttaatcaaaggtatacaggaattagtagatttatttgaagacaaacatatttatacagctttagaaacacaaggtagtcgtttccaatcatggatgacacaaattgacgatttaacgattagtccaaaaccccctagttcgggaatgaaaactaatctagaaatattagattctgttataaatcaatgtacatttcattcacttaatttgaaagttgtgatttttgacgatgcagactatgattttgcaaaattaattcatcatcgctaccctaacatcccattctatctacaagtaggtaatccttatcttgatgataacgttgaccaacatacagataaattacttgaaaggtatgagcaattagtggatcgtgtaatgcaaagtagtgatatgaatcatgtctatgtactaccgcaattacacacattattatggagtaataaaaaaggtgtctaa

SEQ ID NO: 8701 - DNA, 420 bp, Staphylococcus epidermidis; identical to SEQ ID NO: 3819

SEQ ID NO: 8702 - DNA, 672 bp, Staphylococcus epidermidis
atgtcacaaaatgacttaaataaagaaaaagcacttgtcgtatttagtggtggtcaagatagtacgacatgcttattttacgctaaaaaacattttaaagaagtagaactcgttacatttaattacggacaaagacatgataaagaaattgaagttgcaaaaaaaattgcaaaagaacaaaatttgaaacatcatattttagatatgtcattactatctcaacttactcccaatgcacttacacaacatgagttaagtattgaagataatgatgatggtattcctaatactttcgtaccagctagaaatctattgtttttatcttttgctggcgcgttagcctatcaaattcatgttaaacatattattactggtgtttgtgaaacagatttttcaggttatccagattgtagagatagctttatcaaatctatgaatgtaactttaagtctttcaatggataaagactttgtcattcatacaccattaatgtggttagacaaagcacagacatgggcactcagcgataagctaggtgtgttagattatattcgccacaacacattaacatgttataacggtatcattggtgatggttgtggtgaatgtccagcatgtcacttaagagctcgaggtttaaaacattatcttgaacataaaggagaagaataa

SEQ ID NO: 8703 - DNA, 588 bp, Staphylococcus epidermidis
atgattttaatgatagataatcaagattcctttacatataacttaatagattatattaaagtacaaactactgaagaagtgaaaatcatttctgtaaatgatttgatgacacagcatctcgatgcattgaatccgagagcgattgtcatttcacctggacctgggaaacctagtgattatccaatactatcatccgtattagaaatatttcaccgtcacgttcccattttgggcgtctgtttaggttttcaattaatcattgaatactttggaggaaacattattcataatgataaacctattcatggacatattaccaagataaggcatagcaatgagggtatttttaaaggtctaccatcgtattttaacgtgatgcgataccattcacttatggctgacccctctacaatacctagcgcattaaaagtcacagctctgaacaacgagaatgttattatggctgttgcacatcataagtatcctatttatggtttacagtatcatcctgaatcaatactaagtgaatatggtcacgaacaattaaatttattcttaaccgaggtaggggttaaatatgcacattga

SEQ ID NO: 8704 - DNA, 1152 bp, Staphylococcus epidermidis; identical to SEQ ID NO: 6443

SEQ ID NO: 8705 - DNA, 609 bp, Staphylococcus epidermidis
atgcatttatttgaaacaatgaaattggataagggattcattcctcgtcttgactaccattatcaacgtatttcaacttctagtgagcatctaggatttcaatttgatcatctattttggaagcagtttattcataatataaaaaccttgcattcaaaaggcgtatttcgtttgaaggtgacgttaaacaaagaaggtgaattaaactatgagttatttccgatacccgataaacctttttttaccgctcgactagttcaacaaaaaaagaatattgataaagtaatcataactaataaaacaacagaacgtgattatttaacacataatcatttcacagacttaatactgatctatgatgaagatggtaaaattttagagtttgacattggcaacgtgatgatacaagaaagagataaattgtatacaccaacatataaaggagacatgctccccggctgtatgagacaatctcttatagatcaaggcaaagttatagaaaaagatttttatatcgaagaatttaaagaaaaaatcaaatcgagtcaaatcaacgtctatttaatcaatagcttaagagaggttgtcggtgttaaagtatatgtataa

SEQ ID NO: 8706 - DNA, 207 bp, Staphylococcus epidermidis; identical to SEQ ID NO: 3814

SEQ ID NO: 8707 - DNA, 732 bp, Staphylococcus epidermidis; identical to SEQ ID NO: 6446

SEQ ID NO: 8708 - DNA, 1005 bp, Staphylococcus epidermidis; identical to SEQ ID NO: 6447

SEQ ID NO: 8709 - DNA, 1941 bp, Staphylococcus epidermidis
atgagtttacccaagaagaaaataggaatttttgcgttcttcttattaacggtattcaccattactttgaagacatatttttcatattatgttgacttttctttaggtgtcaagggtttagtacaaaacttaatattgcttatgaatccttatagtttgattgcacttgtactaagtgttttcctattttttaaaggtaagaaggcattttggttcatctttattggaggatttttacttacgtttctactatacgcaaacgttgtgtacttcagatttttctcagatttcttaacttttagtacactaaaccaggcaggcaacgttgaatcaatgggtggtgcagtaagtgcttctttcaaatggtatgactttgtctacttcattgacactattatctatcttgctattttaatatttaaacgtaaatggttagataatagagcattcagtaaaaaattcgtacccgttgtgatggctacatcagtagcattatttttcttaaatttagcgtttgcagaaacagatcgtcccgaattattaacaagaacttttgaccataaatatcttgtgaaatacttaggaccatataacttcactgtttatgatggtgtaaaaacaatcgaaaataatcagcaaaaagcactagcttctgaagacgacttaactaaagtgctgaattacactaagcagaaacgtactgaacctaatcctgaatattatggtgcagcgaaaaagaaaaatataattaaaattcaccttgaaagtttccagactttcttaatcaataaaaaggtaaatggtaaagaggttacaccgtttttaaataaattatctagtggtaaccaagattttacgtatttcccaaactttttccatcaaacagggcaaggtaaaacatctgactcagagtttacaatggacaacagtttatatggcttaccgcaaggctcagcctattcactgaagggagataatacgtatcaatcattaccagctatactagaccaaaagcaaggttatacatctaatgtaatgcatggtgactacaaaacattttggaatcgagatcaagtttataaacatttcggtattgacaatttctatgatgctacttactatgacatgtctgacgacaatattgttaatcttggtttaaaagataaaccattctttaaagcatcagcagattatcaatctaaaatgaaaaagccgttttattcacacttaattactttaactaaccactatcctttcacattagatgaagaggatgcttctattgataaacctaataccggtgactcaacagtagacggttatatacaaacggcacactatctcgaccaagctttagaggaatatattactgaccttaagaaaaaaggtctatatgataactcagtcattatgatttacggtgaccattatggtatttctgaaaatcataataatgctatggaaaaattattaggtgagaagattacaccagctaaatttacagatttaaaccgcactggcttctggttaaaagttccaggtaaatcagggggcgtaaataaagagtatgctgggcaaatggatgttatgcctacattactacatcttgttggtattgatagcaagaattacctaatgtttggttctgacatgttctctaaacaacacaataacgtagtaccgtttagaaatggtgattttatcactgaagattataagtatgtgaatggtaaaatttactcaaataaagataatgaattgcttactgaaaaacctaaagacttcgataaaaataaaaaacaagtagagaaagatcttgaaatgagtgacagcgtgttaaatggtgacttgttcagattctacaaaaatcctgactttaaaaaagtaaatcctggtaaatatgaatataaatcaggtccaaaagggaacgaaaaaaaatag

SEQ ID NO: 8710 - DNA, 816 bp, Staphylococcus epidermidis
atgtcagatttattccaaaacgcaccaccctatattcaggcgcttatagccggaataatcacgtggttacttactgctttgggtgcggcagcagtttttatatttaagaaagtgaatgataaagtcttaaattcgatgcaaggttttgcagctggaatcatgatagcagcaagtttttggtcattgttacaacccgcaattgaatcgagtgaaaatagtgctatgccatggcttcctgcagcaataggttttattctcggtggcgtttttatcagggttctagattatattattccccatattcaccaaaatgcccaagataaaaaccaacaacaagagggtgtgcctacctctcttggaaaaaatgcattacttgtgttagctatcacacttcacaacatacctgaaggactatctatcggagttgcattcggtggtgttgtatctggcaacagtcacgctacatttttaggtgcgattggtctagcgataggtatcggcatacagaatattcctgaaggtgcagcactatcgatgccaatccgtgctgcaggtgcaacacgttggaaagcatttaattatggacaagcttcagcaattgttgagcctattttcgctactatcggtgctgcagcaattttagtggtaaatcctatattgccttatgcattagcgtttgctgcaggtgcaatgattttcgttgttgttgaagaactgatacctgattctcaatcaagtaacaacactgatttggcaactttaagtctaatgattggttttacaattatgatgattcttgacgttgcacttggataa

SEQ ID NO: 8711 - DNA, 1884 bp, Staphylococcus epidermidis
atggaagcatacaaaattgaacatttaaataaatcctatgcagataaagaaatttttaatgatcttaacctatctatatctgagcatgaaagaattggattagtaggtatcaatggaacaggtaaaagtacattattaaaagtcattggtggtctagatgaagattttactgcagatattacccaccctaatcaatatcgcattcgttattcctctcaaaaacaagacctcaatggccatatgactgtgttcgaagctgttttaagttcggatactcctacattaagaattataaaaaaatatgaagaagcagttaatcgctatgcgttagatcaaagtgactctaattttaataaaatgatggaagcacaagaagaaatggatcaaaaggatgcatgggactataatgcagaaattaaaacgattttatctaaactagggattcacgatacaactaagaaaatagttgaactttcgggtggtcaacaaaaaagagttgtattggctaaaactctaatagaacaaccggatttacttttgctagatgaaccgacgaaccatcttgactttgaatccatccgttggctcattaattatgtcaagcaatatccacatacagttttatttgtaacacatgatcgctactttttaaatgaagtatcgacgcgaattattgaactggatagagggaagttaaaaacatatccaggtaattatgaagattacatagtaatgcgtgcagaaaatgaattagtagaacaaaaacaacaagaaaaacaaaaagcattgtataaacaagagttagcatggatgcgagcaggagcaaaggcaagaactactaaacaacaggcacgtatcaatagatttaagcaactagaatcagacgttaagacgcaacatacacaagataagggtgaacttaatcttgcatattcaaggttaggtaaacaagtatatgaattaaagaatttatcaaaatcaattaataataaagttttatttgaagatgtcactgaaattattcaaagtggtagacgtataggtattgtaggacctaatggagcgggaaaaacaacattacttaatattttaagtaatgaagatcaggactatgagggtgagcttaaaatcggtcagactgttaaggtagcttattttaagcaaacagaagagacacttgaccgtgatattagagtgattgactacctaagagaagaaagtgaaatggctaaagaaaaagatggtacctcaatttcagttacacaattgttagaaagatttttatttccgagcgctacacacggtaaaaaagtttataaactctcaggtggagaacaaaaacgtctgtatttattgcgtttacttgttcataaacctaatgtactccttttagatgaaccgactaatgatttagatactgaaacacttacgattttagaagattacattgatgatttcggtggttctgtcattacggtcagtcatgatcgttatttcttaaataaagtggtacaagaatattggtttattcatgatggtaaaatcgaaaaaattattggatcatttgaagattatgaatcttttaaaaaggaacacgaacgccaagccatgctatctaaacaaactgaacaacaaaataaacataagcatcaaccaaaaaagaaaacaggactatcttataaagagaagttagaatacgaaacaattatgacgcgtatagaaatgactgaaacgcgtttagaagaccttgaacaagaaatgattaatgcaagtgataattatgcaagaatcaaagaacttaatgaggaaaaagagcaacttgaagcaacctatgaagcagacatcacgagatggagtgagcttgaggaaattaaagaacaataa

SEQ ID NO: 8712 - DNA, 1779 bp, Staphylococcus epidermidis
atgcaagagactttatcgcattattttggttataagtcatttcgaccaggacaagaagaaattataactaaaatattaaatcatcagcatacactgggggtactacctaccggtggcggtaaatcgatatgctatcaagtaccaggtttaatgcagggtggcacaactattgttataagtccacttatttctttgatgaaagaccaagttgatcaactacaagcaatgggaattcaagctgcatatttgaatagtagtttgactcataaacaacaaaaagagattgaagagcaaataaagcgtggtgccattcagtttttatatgtagctccagagcgctttgaaaatactttttttctaaatttattacgtaaaatagaaataccccttatcgcttttgatgaagcacactgtatatcgaagtggggacatgattttagacctagttatcaaagtgtcatacaaaaagtttttaccttacctcaaaacttcacaatagttgcacttacagctacggcaactgctgaagttcaacaagatatcatgtctaagttatcaattggacaaaatgatgttgtcaaaacaagtactaaaagacgcaatttaatcttcaaagtcaatccgacttatcagcgacaaaaatttgttgtggattatgttgcaaatcatgaaggacaggcaggaatcatttattgttccactcgtaagcaggtagaagaattacacgaagctctaaatagtgaaaaaattaagagcacaatttatcatgctggtttaacgaataaagagagaattgaggcgcaaaatgatttcttgtatgatcgtgtagaggttgtcattgcgacaaatgcatttggtatgggtattgataaatcaaatgtacgttatgtcattcactataacatgcctggagatttggaatcttactatcaggaagctggacgcgcgggacgtgatggtttaaaaagtgagtgtatccttttgtttagtgaacgagataagggattacatgagtattttattactgtatcccaagctgatgatgactataaagataaaatgggcgaaaaattaacgaaaatgattcaatataccaaaacgaaaaagtgtttagaagcgacaattgttcattattttgaacccaatgaaaatttagaggaatgcaatcaatgtagtaattgtatacaggaaaataaaacgtatgatatgactcgtgaagcgaaaatgattattagctgtattgctcgaatgaagcaacaggaaaattatagtgttattatacaagttttacgtggagaagtgacagattatataaaacaccatcattataatgaattaacgacacatgggttgatgaaaaattatacaacatctgagttatcacacttaattgatgagctacgtttcaaaggatatttaaatgaaaatgatgaaattcttatgtgtgatacatcagtgaaacaattactaaataatcataccaaggtttataccactccgttcaaacaaaaaactaaagagaaggtatttatcaacactgttgaaggtgtggatagagcgttatatcgtgagcttgttgatgtacgtaaacagctaagtgataaacttggaatagcacctgtaagtatattttctgattacacgctcgaagaatttgctaagcgtaaacctgaatcgaaacaagaaatgattgctattgatggtgtaggtagttataaattaaagcattattgtcctaagtttatcgaaaccatacaaagctataaaactagaatataa

SEQ ID NO: 8713 - DNA, 975 bp, Staphylococcus epidermidis
gtgattaaatttaaaaatgtcacaaagcgatatgctaataatattgctgtagataatgtaagttttaatattaaagaaggagaattttttgtgttaattggtccttcaggttgtggtaagacaacaacacttaaaatgatcaatcgtttaattcctttaagcgaaggttacatatattttaaagataaaccaattagtgattatccagtttacgaaatgcgttgggatattggatatgtactacaacaaattgcattatttcctcatatgactatcaaagaaaacattgcacaagtaccccaaatgaaaaagtggaaagataacgatattgatttacgtgtggatgaattattgacaatggtaggtttaaatcctgagcaatttaaaaatagaaaacctgatgaactatcgggtggacaacgacaaagggttggtgtagtgcgagcattagctgcagatcctcccgttattatcatggatgagccttttagtgctcttgacccaattagcagagagaagttgcaggacgatttgattcatttgcaaactcaaattaagaaaacaatagtttttgtaacgcatgatattcaagaagcgatgaaactaggtgacagaatttgtttactcaatgaagggcgtgttgaacaaattgatacacctgatggttttagaacgcgacctaaaagtgactttgtaaagcaattcatgggtagtcatttggatacaacgcataatattgtgaatcaagtgaagattaaagatttaggaattaatcggtctgtagatgacaatgcaagcgttattcattatcctgaagtagatgctgagttgtacttaaataatatttatgaagatttgtctcattatgatgcagttgtggtcaacgataaagaacaacatcgtcgatatttgttaaatagagaagatgtgtttacttatttatctcttaataaggaggaagcgacacatgaatga

SEQ ID NO: 8714 - DNA, 1080 bp, Staphylococcus epidermidis
atggtattaatcattggtactgctacactcgcagctttaataggcgctggtggtctaggagatttaatattattaggcattgatcgtaacaatagtgcactcattttaataggtgctattccagctgcacttctagctattatttttgattttattttaagatacatggaaagtttatcatataaaaaattgctcatttctttagggacaattgtaattgtgattatcatagctattgccatacctatggcagcgcaaaaaggtgataaaatcacattcgcaggcaagctaggttcagaaccgtcaattattacgaatatgtataaaatacttattgaagaagacacagatgatactgtagaagtcaaagatggcatgggtaaaacctcattcttatttaatgcgcttaagtcagatgaaattgatggttatttagaatttacaggtactgtattaggtgaattaacgaaagaagatttaaagtctaaaaaagaaaacgatgtatatcaacaagcaaagtctagtttagaaaaaaaatatgatatgacaatgcttaaaccgatgaaatataataatacgtatgcattagctgtaaaacgtgactttgcaaaaaaatatcaaattaagacaataggtgatttacgcaaggtagaagataaacttaaaccaggttttacattggaatttaatgatagaccagatggatacaaagctgttaaaaaaacatatcatcttaatctttctaatgttaaaactatggaacctaaattacgttatactgcagttaaaaagggagatattaatctcatagacgcatactctactgatgcagaattaaaacaatataacatggtagtattaaaagatgatcaacatgtatttcctccataccaaggagcaccgctatttaaagaaaaatatttaaaagaccatcctgaagttaaaaaaccgctcaataaattggcgaatagaatcacagatgaagaaatgcaagaaatgaactataaggtaacagtgaagaaagaggatccttataaagtagcaagagaacacttagaaaaagaaaaattaataaaataa

SEQ ID NO: 8715 - DNA, 1056 bp, Staphylococcus epidermidis
atgaagaaacaattagaccaattaacagcatatacgccagggctttctccagaatctttaaaaaaacagtatggcattaaaggtgaattacataaacttgcttcaaatgaaaatgtatatggtccaagtccaaaagttaaaacggctattcaatctcatttagatgaattatattattatccggaatctggatcgccaaaattaagggaagcaataagtcaacaacttaatgttgatgcatctcgtattttatttggtgcgggtttagatgaggttattctaatgatatcaagagccgtattatcaccaggagataagattatcactaatgaatctactttcggacaatattatcataatgcaattgtggaatcagctgatgttatccaagtgcctctcaaagatggtggatttgatttagatggtatgttacaacaaattgataataaaacgtctttaatttggttatgcaatcctaacaatccaactgggacttacttttcgcacgatgaattatttaatttcttaaaacgtgtcccaagtgatattcctgtattaattgacgaagcatatgtagaattcgttactgctgatgattttccagatacgctaaaattacaggaggattttgacaatgcctttttattacgtactttttctaaggcatatggattagctggattaagagtaggatatgttatagcctctgaagacgccattgaaaagtggaatatcattcgtccaccatttaatgttactagaatttcagaatatgcagcaatcgctgccttagaagatcaagagtatttgaaagaagtgacacaaaaaaatagttttgaacgagataaattttatcaaattcctcaaagtcagcattttttaccaagtcaagcgaattttgtctttgttaaaacttcaagaagtcaagcactttatgatgcattgttaaacgtaggatgtattacacgtttattccctaacggtgttagaattactattggtttaccagaacaaaataataagatgattgaagttttaaaacattttgagtattaa

SEQ ID NO: 8716 - DNA, 540 bp, Staphylococcus epidermidis; identical to SEQ ID NO: 3486

SEQ ID NO: 8717 - DNA, 2610 bp, Staphylococcus epidermidis
atgttatctgtaactaaaaaaaatacatatgaatcaaacaaagatgaagtcacacaaatgattgattcattagcagaaaaaggacaagaagctctaaaagaactatctaaaaaatcacaacatgagattaatgacattgtacatcagatgagcatggctgctgttgatcagcatatgcatttagctaaactagcttacgacgaaacaggtagaggtatttatgaagacaaagctatcaaaaatttatatgcctcagagtacatatggaattcaatcaaagacaataaaacagtaggtatcataggtgaagataaacaaaaaggattaacgtatgtagctgaacctataggcgtgatttgtggagtgacaccaacgaccaaccctacatctacaactattttcaaagcaatgattgctattaaaacaggtaatccaattattttcgcatttcatccaagtgcacaacaatcatcaaaatatgctgctaaagtcattttagaagctgcaacaaaagcaggtgctcctaaagattgtattcaatggatagaagtgccatcaattgaggcaactaaacaattaatgaatcataaagatattgctttagttctagcgactggaggctctggaatggtaaagtccgcatattcgacaggtaaacctgcattaggagtcggtccaggtaatgttcctacttatattgaaaaaactgctcatatcaaacgtgctgttaatgatatcattggttctaaaacttttgataatggtatgatttgtgcttctgaacaagtcatggttgttgataaagaagtatacactgacgtcgttaaagaattcaaattacaccaaacatattttgttaataaaaatgaactacaacaattagaagatgccatcatgaatgaagataaaactgcagttaaacctgatatagttggtaaatctgctgtagatatagcgaaattgtcaggaattagtgttccagaaaaaacaaaattattagtcgcagaaattgatggaattggaaaagattatcctttatcacgtgaaaaattatcacctgtactcgcaatggtaactgcaaaatcaacaggacatgcactacaaatttgtgaagacatattaaaatttggtggtttaggtcacactgctgtaattcacaccgaggatagtcaattacaacaaaaattcggtctaaaaatgaaagcttgccgtgtattggtaaatacaccttctgctgtcggaggaattggaaatatgtataatgaactcattccttcactcacgttaggttgtggttcatatggtagaaattctatttctcataatgtaagcgcagtagacttattaaatattaaaacaatagcaaaacgtcgtaataatatgcaatggtttaaactcccacctaaagtttattttgaagaaaattcagttatgtatttgacagagatggataatgttgaacgtgtaatgatagtttgtgatccaggaatggttaatattggttatactgatatagttgaacaagtgctgagacgccgagaaaaccaaccacaaatcaaagtgtttaacgaagttgaacctaatccatcaactcatacagtctataaggggttagaaatgtttataaatttccaacctgatactattattgcactcggtggcggttcggcaatggatgcagccaaagcaatatggatgttctttgagcatccagaaacttcattttttggggcaaaacaaaagttcttagatattcgtaaacgtacttataaaattaccaaacctaaaaacgcaaaatttatatgtataccaacgacatcaggaactggttctgaagtgacaccttttgcagtaattactgatagcgagacacacgttaagtatccactagcagattatgcgttaactcccgatattgctatcgtcgatccacaattcgtattaagtgtacctaaagatgttgccgcagatacaggaatggatgttttgacacatgccattgaatcttacgtctctgtcatggcttcagattatacaagaggcttaagcttacaagcaataaagttaacttttgattatctaaaatcatcagttcaagaaaatgacaaacactcacgagaaaaaatgcataatgcttcaacaatggccggtatggcatttgccaatgcttttttaggaatttctcattctatcgcacataaaattggtggtgaatatggtattccccacggcagaacaaatgctattttattaccacatgtcattcgctataatgccaaagatccacaaaaacatgcactgtttcctaaatatgatttctttagagcagatactgactatgctgacattgcaaaatttttaggactcaaaggtaatacaactgaagaattagtggatgctctagctaatgcggtgtatgatttaggatgttcagttggtattgatatgaatttaaaatcacaaggcgtaactgaagagcttcttcactctactatagacagaatggctgaattagcatttgaagatcaatgtacaactgctaatccaaaagaaccgctaattagtgaacttaaaggcattatcgaaacagcatatgattatgaaagataa

SEQ ID NO: 8718 - DNA, 924 bp, Staphylococcus epidermidis; identical to SEQ ID NO: 3484

SEQ ID NO: 8719 - DNA, 162 bp, Staphylococcus epidermidis; identical to SEQ ID NO: 6202

SEQ ID NO: 8720 - DNA, 1506 bp, Staphylococcus epidermidis
atgacttcaaataagtcccatgaaaaagcagttcaagaaataccacaacatggattcttcgggcatccaaaaggattaggcgttctctttttcgtagaattttgggagagattcagctattacggaatgagagcaatgcttattttttatatgtattttgcactccaggaaaacggacttggaatggacaaaacaacagccatgtctatcatgtctgtatatggatcattaatttatatgtcttcaattccaggtggctggatagctgatagaattacaggtacccgaggtgccacattaatcggagctatattaattattataggtcacatatgtttaagccttccttttgcaatggtaggtttattcacttctatgttctttattattgtaggatcaggtttaatgaaaccaaacatttcaaatattgttggtagactctatccagaaaacgacgtacgcatggatgctggatttgttatcttctatatgtcagtgaacatgggtgcactcgtttcaccaattattttacaacactatattgatattagaaatttccatggcggcttcttgattgcagcaatagggatggctcttggattagtttggtacttactatttaaccgaaaaactttgggtagtatcggtatgaaaccgacaaacccattatcttcttctgaaaagaaaaagtacggaacaatcatcggaatcgttgttatagcaatagtattaatccttatgattgcttactttacgcatacgctatcatttaatttaatcagtaatactgttttaattttaggtattgctttaccaatcatttactttacaacaatgattagaagtaaagaagttacagatactgaaagatcaagagtaaaagcatttattccgttattcattttaggtatgttattttggtcaattcaagaacaaggatctaatgtattaaatatctatggtattgaaaactctgatatgaaattaaatttatttggttggaaaacacattttggtgaagctattttccaaaccattaacccattatttattttattatttgcacccgtggttactcttttatggcaaaagctaggaaagaaacaacctagcctacctattaagtttgcaattggtactattttagcaggcgcatcctacatacttatgggagcaatcggtcatatttatggggatacacaattctcagttaactgggttattctttcatacgttatctgtgttattggtgagctttgtctctctccaactggtagtagtgcagcagttaaattagcacctaaggcatttaacgcacaaatgatgagcctttggttattaactaacgcttcagctcaggccattaacggtacattagttaaattaattaaaccacttggtcaaaccaattactttatcttcttaggtgttgttgcaaccgtgattacgttaattatattagcgtttattcctaagatttctaaagcaatgaaaggtattcgttaa

SEQ ID NO: 8721 - DNA, 501 bp, Staphylococcus epidermidis; identical to SEQ ID NO: 3481

SEQ ID NO: 8722 - DNA, 876 bp, Staphylococcus epidermidis
atgatattgaattcaaaagttaaaggtattattgctatattgatttcagctgtgggttttagttttatgtcagtcttttttagattggccggtgatttaccagtctttcaaaaatctctagctagaaattttgtagccatgtttataccattattttttatttataaatataggcaacctatgtttggaaaattaagtagtcaacccctactcatctcacgttcaacacttgggttaattggtgtcttacttaatatctacgcaattgatcacatggtattaagtgatgctgatacattaatgaaattaaatcctttttggacaattgttcttagtttaatttttttacatgaaaaggtacgaaaatatcaaatcacggcgatgattattgctataatagggatgctattaattgttaaaccagaattttcatcatcagttattccttcaatagcaggattactatccggtatttttgcagcttctgcctacacatgtgttagagcactcagcactcgtgaaaaaccttatacgatagtgttttatttttcattattctcagttgtagttcttatacctttttcaatatttacttatacacctatgacaacaattcaaattcttttcttactcggcgctggattatcagcagctgtgggacaaattggtataacattggcttatagttttgctccagcaaaagatatctccatcttcacatatgcgtctataatatttactgcattatttggatttattctgtttggagaatcacctgatatgtttgcaacagtaggatatattgtcattatcggagcaagttactatatgtttgataaagcaagacgtgaaacaactataaatcaaaataattaa

SEQ ID NO: 8723 - DNA, 399 bp, Staphylococcus epidermidis; identical to SEQ ID NO: 3479

SEQ ID NO: 8724 - DNA, 2106 bp, Staphylococcus epidermidis; identical to SEQ ID NO: 3478

SEQ ID NO: 8725 - DNA, 969 bp, Staphylococcus epidermidis; identical to SEQ ID NO: 3477

SEQ ID NO: 8726 - DNA, 180 bp, Staphylococcus epidermidis
atgaaagttggtattataaaatattttgatgtattattactgctggataaaacatttataaaattcccaaaaaatatgaaaaaactattgaaaaaagaaaatagagtctataatattgatgttaatgataatcattatcattactttcgtatattgaccttatacatctttaatatttag

SEQ ID NO: 8727 - DNA, 975 bp, Staphylococcus epidermidis; identical to SEQ ID NO: 5037

SEQ ID NO: 8728 - DNA, 960 bp, Staphylococcus epidermidis
atgcaaatgagcgctaataaaaaaataagtatactggtcgttatggcaatttgtatggcaattttttatttattggtaggtttagattttgatatatttgaatatcaattccaaagccgtttcaaaaaatttattcttatattattagtaggagcatcgataggaacgtccgtagttattttccaatctattactacaaatagattattaactccttctattatgggacttgattctgtgtatttatttgtcaaagtcttacctatttttattttaggtgaacaagcaactgttgttacaaatatctaccttaattttttaatcactttgatcgcaatggtgtttttttcattgctattatttcaagttatatttaaactaggtcacttttcagtctatttcatattactagttggtgtaatattaggaactttcttccgtagtattacaagttttctccaacttataatgaatcctgaatcttttttagcagttcaaaatgttatgtttgctagctttgaagcatcaaattctaaattagtaactgtttcaggcatattattagttatattaataattgttacaataatacttcgaccatatttagatgttcttttgttaggtagagcacaagcaattaatctaggtgtttcttatgagaatatgacgcgtatgtttcttattttggttgctttacttgtctctatatctactgcattaataggtcctgtaacatttcttggcttattaactgtcaacttagcacacgaatttatgaagacctatgaacacaaatttattttaccggcaacaatattattcagctggattagtttatttatagcgcaatgggtagttgaaaatctattcgaagcaacaactgaattcagtttgatagtagatttagttggtggaagttacttcatatatttgcttgtcaaaaggagaaatgcaaattga

SEQ ID NO: 8729 - DNA, 780 bp, Staphylococcus epidermidis; identical to SEQ ID NO: 3474

SEQ ID NO: 8730 - DNA, 1041 bp, Staphylococcus epidermidis
atgaaaaaaacagtcttatttttattattgtctctagttttagttttaacggcttgtagtaatagttcgaataataattcaacttcgaaaaagaaaaatagtgattctaaagaaactgtaaccatcaaaaatagttttgaagcaagtggtaaagaaaataatggcagtgataagaaaaaaatctctaatactgtcgaagtaccaaagaatcctaaaaatgccgttgtattagattatggagcgcttgatgtgttgaaagaattaggtgtggctgataaagtaaaaggtttacctaaaggtgaaaataaccaatctttacctaaatttttagatgaatttaaagatgataagtatattaatactggaaatttaaaagaagtgaactttgataaagttgcatcagctaaaccagatgtgatttttatttcaggaagaacagctaatcagaaaaatttagatgaatttaaaaaagctgcaccaaaagctaaagttgtatatgtaggtacaagtgatgacaacttaattaaagatatgaaaaaaatacagaaaattggaaaatctacgataaagaagataaagctaaaaaaattaataaagattttagatagaaaaatatctgatatgaaagataaaactaaagactttaataagaaagtaatgtatttattggttaacgaaggtgaactatcaacgtttggaccaggaggaagatttggtggtttagtgtttgatacattaggatttaaacctgcagacaaaaaggttagcaaaagcccgcatggtcaaaatataaataatgaatatattaacaagcagaatccagatgttattttagctatggatcgtggttcagttgtaggtggtaaagcaacaacaaatcaagttttaaaaaacaaagttataaaaaatgtaaaagcagtaaaaagtaatcatatttacgaattagatccaaaactatggtatttctcttcaggatcttcaacgacaactatcaaacaaattgatgaattaaatgaagtagtagagaaagttgaaaaataa

SEQ ID NO: 8731 - DNA, 315 bp, Staphylococcus epidermidis
ttggtaaaggtttatggatcactcatagataatgaaacacgatgtacacattattattcatctttagatgttattgccattaaatttaaatgttgcaacaaatattatccgtgttataaatgtcataatgaacacgtatctcatacaattgaaagatgggctgaaaatgagtttgatgaaaaagctattatgtgtggtgtttgtaaacatgagatgcgtattcgtgactatatgatggtagaaatgtgtcctcgttgtaaagcgcattttaacagtcgttgtaaatttcattatcatttatattttgaagtataa

SEQ ID NO: 8732 - DNA, 933 bp, Staphylococcus epidermidis
atgttcaaaacattgaataaaaatgacatcttacgcggattagagtcaattcttcctaaagatattattaaagtggatgaacctctcaagcgttatacatatacagaaacaggaggagaggcagatttttatttatcccctaccaaaaatgaagaagtccaagccatcgtaaagtttgcccatgagaacagtataccggtaacttatttaggaaatgggtctaacattatcattcgagaaggtggaattcgaggaatcgtcctcagcttattatctctcaatcatattgaaacctctgatgatgcaattatagcaggtagtggtgcagcaattattgacgtttcaaatgttgcacgtgaccatgtattaaccggtttagaatttgcatgcggtatccctgggtcaattggtggcgccgtattcatgaatgctggtgcttatggcggagaagttaaagactgtattgactatgcattatgtgtcaatgaaaaaggtgatttattaaagctcactacagctgaactggaattagactatagaaatagtgtgatacaacaaaaacatttagttgtattagaggctgctttcaccttagaaccaggtaaattagatgaaattcaggccaaaatggatgatcttactgaaagacgtgaatctaaacaaccgcttgaattcccttcttgcggaagtgttttccaaagaccaccgggtcattttgcaggtaaactcattcaagattctaatttacagggctatcgaatcggtggcgttgaagtttcaactaagcatgcgggattcatggttaatgtagacaacggtacagcaactgattatgaagcacttatacatcacgtacaaaaaatagttaaagaaaaattcgatgttgaattgaatactgaggtacgtattataggtgatcatcccacagattaa

SEQ ID NO: 8733 - DNA, 528 bp, Staphylococcus epidermidis; identical to SEQ ID NO: 3470

SEQ ID NO: 8734 - DNA, 891 bp, Staphylococcus epidermidis; identical to SEQ ID NO: 3469

SEQ ID NO: 8735 - DNA, 321 bp, Staphylococcus epidermidis; identical to SEQ ID NO: 3468

SEQ ID NO: 8736 - DNA, 1131 bp, Staphylococcus epidermidis; identical to SEQ ID NO: 3467

SEQ ID NO: 8737 - DNA, 1239 bp, Staphylococcus epidermidis; identical to SEQ ID NO: 2613

SEQ ID NO: 8738 - DNA, 495 bp, Staphylococcus epidermidis; identical to SEQ ID NO: 5026

SEQ ID NO: 8739 - DNA, 762 bp, Staphylococcus epidermidis; identical to SEQ ID NO: 2611

SEQ ID NO: 8740 - DNA, 1077 bp, Staphylococcus epidermidis; identical to SEQ ID NO: 2610

SEQ ID NO: 8741 - DNA, 1080 bp, Staphylococcus epidermidis; identical to SEQ ID NO: 2609

SEQ ID NO: 8742 - DNA, 642 bp, Staphylococcus epidermidis; identical to SEQ ID NO: 2608

SEQ ID NO: 8743 - DNA, 867 bp, Staphylococcus epidermidis; identical to SEQ ID NO: 2607

SEQ ID NO: 8744 - DNA, 1083 bp, Staphylococcus epidermidis
atggatagtattacagatatatgtctcgtaaaaagttttcaaaaagcaacaaaagcgaattatcagttaccctttgaattatcaaagcaacagcaatacgcttcagaaactatcgttcaagctataaaaaataataatgacctcttgttatatgccgtcacaggagcagggaaaactgaaatgatgtttgagggaattaggatagctcgtcagatgggacataatattgctattgtatcacctcgtgtagacgttattattgagataagtcatcgaattaaagatgcttttatcgatgaacatatagatgtgctacatcaatctagtagacagcaatataatggtcattttgttattgctactatccatcaattattgaggtttaaacagcattttgatactgtatttgtcgatgaggtagatgcttttccgttgtctatggatccacaattatcaaatgcaatacaacttgcttcaaaatcgaatcattcacatattttcatgacggccacaccaccgcgtcattttttaaaacaattccccccagaaaaaataattaagttaccagcccgttttcaccgatccccccttcctattcctaagttcaaatatttcaaattaaaatcaacacgaaaacaaaatttattacttaatatatttagatatcaaattaaccaacaacgttttactttggtctttattaataatatagaaattatgaataaaatgtatcaacagtataaaatggacatccctgatttgatttgcgttcacagtgaagatgatttacgatttgaaaaaattgaagctttaagacgaggacaacacaaaattgtattcactacaactattttagaaagaggatttacaatgacacacttagatgtcgttgtagttgatgctggaagttttcaacaagaggctttaattcaaattgctggtcgcgtaggacgtaaacagcagtctccaagtggcttagttttatttcttcatgaaggtgttacattatcgatgattttagctaaaagaaacattatttcaatgaatcgtttagcaattaaaaggggatggattgatgcgtaa

SEQ ID NO: 8745 - DNA, 675 bp, Staphylococcus epidermidis
atgcgtaaatgtatccagtgcaatcaacctattcatgagaccattcatatttataacttatttaaaccacctcagatattttgtgaacgatgtgaaacattatggcttaactccaaaattcataaagatggtaggtgtcctaagtgccttaacaacaaaatttctactgatggcgaatgtcatgactgtcaattcttaagtaaaacattttatttaatggaacaattgttttgtgattatagttatgatggtatgatgaaagaaatcatacaccagtataagattaagcgagacttctatttggcagaagtattggcgagaaaattagttttacctcaaacgcaatatgattatatagttcccattccttctccaattgaacgcgacattgaacgtacatttaatcctgtgaccactgtcttagataaaatgggcatctcatatcaagatgtattaggtacacatatacgtcctaagcagtcaaagttaggaaagattgaacgttcaaaagcccctaatccattttatataaaagatgaagagataaatatcgaagggaaagtaatactactcatagatgatatttatacaacagggttaactattcatcacgcaggatgtaaattgtacgataaaaaagtcagaaaattcaaagtgtttgcgtttgcacgataa

SEQ ID NO: 8746 - DNA, 570 bp, Staphylococcus epidermidis; identical to SEQ ID NO: 2604

SEQ ID NO: 8747 - DNA, 2535 bp, Staphylococcus epidermidis
atgggatttttatcgaaaattgttgacggcaataaaaaagaaattaaaagattaggtaagttagcagataaagtacttgctttagaggaagatactgcgatattaaccgatgaagaaatacgtgaaaaaacaaaatcttttcaaaaagagttagcagaaattgaagatgtaaaaaaacaaaatgattatttagataaaattttacctgaagcttatgcacttgtacgtgaggggtcaaagagagtatttaatatgattccttataaagtacaagtaatgggtggtattgctatacataaaggtgatattgcagaaatgagaacaggtgaagggaaaacattgactgcaaccatgccgacgtatttgaatgctttagctggtagaggtgtacatgttattacagtcaatgaatatctatcaagttcacaaagtgaagaaatggctgaactatataactatcttggcttaactgtaggtttgaacttaaatagtaagtcaactgaagaaaaacgtgaggcttacgcacaagatatcacttatagtacgaataatgaacttgggtttgattatcttagagataatatggtgaactatgctgaagagagagtaatgcgtcctctacattttgcaattattgatgaggtcgattccatattgatcgacgaagcaagaacacctttaattatttctggtgaagcggaaaaatctacttctttatatactcaagcaaatgtttttgcaaaaatgcttaaagcggaagatgattataattatgatgaaaaaaccaaagctgtacatcttacagaacaaggtgcagataaagctgaacgtatgttcaaagtagataatctttatgatgttcaaaatgtggaagtgattagtcatattaatacagctttaagagctcatgttactttgcaacgcgatgttgattacatggtcgttgacggtgaagtattaattgttgaccaatttactggacgtacaatgcctggacgtcgtttttctgaaggtttacaccaagcaattgaggctaaagaaggtgtagcaattcaaaatgagtctaaaacgatggcatccattactttccaaaactatttcagaatgtataataagttagcggggatgactggtacagcgaaaaccgaagaggaagaatttcgtaatatctataatatgacagttacccaaattccaacaaacaaacctgttcaacgtaaagataattcagacttaatttatattagtcaaaaaggaaagtttgatgcggtagttgaagatgttgtagaaaaacataaaaaaggacaacccgtcttactaggtactgttgctgttgagacttctgaatatatttcaaatttactaaaaaaacgtggtgtcagacatgacgtattaaacgctaaaaatcatgaacgcgaagctgaaatcgtttcaaacgcggggcaaaaaggtgcagttacaattgccacaaatatggctggacgtggaacagatattaaacttggtgatggtgttgaagagttaggtggacttgctgttattggtactgagcgtcatgaatcaagacgtattgatgatcaattacgtggacgttcaggacgccaaggtgatagaggagatagtcgtttttacctatctttacaagatgaattaatggtacgttttggttcagaacgcttacagaaaatgatgaaccgtttaggaatggatgattcaacgccaatcgagtcgaaaatggtatctcgagctgtagaatcagctcaaaaacgagtagaaggtaataactttgacgcgcgtaaacgtattctagaatacgatgaagttttacgtaagcaacgtgaaattatttataatgagcgtaatgaaatcattgatagtgaagaaagttctcaagtcgttaacgcgatgttacgttctacattgcaacgtgcgattaatcattttattaatgaagaagacgataatcctgactacacgccatttatcaattacgttaatgatgtgttcttgcaagaaggagatcttcaagatacagaaattaaaggtaaagattcagaagatatttttgaaattgtatggtctaaaattgaaaaagcatatgcacagcaacaagaaacattaggagaccaaatgagtgaatttgagcggatgattttattacgttcaattgatacacattggactgatcatattgatacgatggatcaattgcgtcaaggtattcatttacgttcatatgcacaacaaaatccacttcgtgattatcaaaatgaaggtcatgaattatttgatatcatgatgcaaaatatcgaggaagatacatgtaagtatatcttgaaatcagtggttcagtttgaagatgatgtagaacgtgaaaaatctaaaagctttggtgaagcaaaacatgtaactgctgaagatggcaaagaaaaagcaaagccccaaccgattgtaaaaggtgatcaggtaggtagaaatgatccatgcccatgtggtagtggtaaaaaatataaaaattgtcatgggaaagcgtaa

SEQ ID NO: 8748 - DNA, 1002 bp, Staphylococcus epidermidis; identical to SEQ ID NO: 5016

SEQ ID NO: 8749 - DNA, 801 bp, Staphylococcus epidermidis
atgaaaaaaacgctaactgtaacgttaagttcgattgcagcttttattgcaatcaacactgcagctaacgcacaagaatctgagacgtcgcaactagacacatatgcaacgggtgatgtaattacaaatcaatcaaacttaggtatttacattgtaaaacctggagatagtttatataaaattgctttagaacataatctttctttagaagagctttatgcattaaatcctggtgtagaacctcttatttttccgggagatgaaattgtagtatctgaaactgcatttgaacaatttaataacacaaacacattcgtaaattatgaaactaactacattccagtaggatataataatgtatcaactgatacatccaacactacttatgataattatgatagtgaatcaactgatacatactctgtgtcaaacgcctatgatggtctaagaagtgtatctaactcaggtaatttatacactactggtcaatgtacttattatgcattcgatcgtcgagctgagctagggaaaccaattggaagtctatggggcaacgctagtaactgggcatattcagctaatcaggctggctttaatgtagatcacacacctgaggttggtgctgtattccaaagtggtccgggtcaaaatggggctggtgcttatggacatgttggcgttgttgaatcaatcaattctaatggttctgtaactgtttcggaaatgaactggaatggtggcgttaacgtaaaatcttacagaactattagcaaccctaattcatataattacattcactaa

SEQ ID NO: 8750 - DNA, 642 bp, Staphylococcus epidermidis; identical to SEQ ID NO: 5014

SEQ ID NO: 8751 - DNA, 234 bp, Staphylococcus epidermidis; identical to SEQ ID NO: 5013

SEQ ID NO: 8752 - DNA, 1986 bp, Staphylococcus epidermidis; identical to SEQ ID NO: 5012

SEQ ID NO: 8753 - DNA, 2835 bp, Staphylococcus epidermidis; identical to SEQ ID NO: 5011

SEQ ID NO: 8754 - DNA, 933 bp, Staphylococcus epidermidis; identical to SEQ ID NO: 5010

SEQ ID NO: 8755 - DNA, 840 bp, Staphylococcus epidermidis
atgaatataacattaggatatatcgatcctgttgcctttagcttgggaccaatccaagttcgatggtatggaattattattgcttgtggtatcttacttggatacttcattgcacaagcagcattgaaacaggttggattacataaagacaccttaatcgatattatattttatagcgcgattgttggattcatagttgcgagaatatactttgttacatttcaatggccatattacatgaatcacttgagtgagataccaaaaatttggcatggtggtattgccatacatggtggcttaattggtggacttatctctgggattattgtttgtaaaatcaaaaatctacatccgtttcaaataggagatattgtggcaccaagtattattttagctcaagggataggacgctggggaaactttatgaatcatgaagcgcatggaggtccagtatctagagcttttctagaacatttacatttgccagactttattattagaaatatgtatattgaaggccaatattaccacccgacgtttctatatgagtctatttgggatgtaataggttttgtcattttaattactttaaggaaacgtctaaaacttggagagacattctttggttatcttatttggtattctgtagggcgctttttcgttgaggcgatgagaaccgatagtttgatgcttacgagtcatatacgtgtcgcgcaacttgtttctgtcgtgcttattttgattagtgtgatattcgtaatttatagaagagttaaataccaaccaataaaatatgaaaattcaggaccattaacatggccgattaaaaaggctaagtga

SEQ ID NO: 8756 - DNA, 528 bp, Staphylococcus epidermidis; identical to SEQ ID NO: 5008

SEQ ID NO: 8757 - DNA, 1440 bp, Staphylococcus epidermidis
atggcacaaaaagaaaataacatcattccaatgatttttgatgaggctttttatcgtaaaatggctacccaaaagtggcgacaacaggactacaagaaggcggcagaatattatgaaaaagtgcttgagttgtcacctaaggattttgatattcaacaacactatgctcaatgtttagttaaattaaatatcggcaaaaaagcagaacgtctattttatgagaatattgttaaagactttcatgtagcagaaagtttctatgaactaagtcaattaaatatagaattaaacgagccaaacaaggcattcttgtttggtattaattatgtaatattgtcagaggataaagattttagagaaatgcttgaaaaaacattcgaagtcgcgtatacaaatgaacaaaaaattgaattagaagcacaattgttttcaacacaacttttatttcaatttctcttttcgcaaggtaggttagaagaagcccgaacatatattttgaatcaatcttacgagatacaacagcatagggtgattaggaatttacttgcaatgtgttatttgtatctaggtgagtatgatagcgccaaagcaatgtttgaagaacttttaaaggaagataattcagacgtgcatgcactttgtcactacacattattactttataataaaaaagaaacagaaaaatatcaaaaatatcttaaaatacttaataaagtagtaccactaaatgacgacgaaacctttaaattaggaatcgtattgagttatttaaaacagtatcgtgcttctcaaaatttactttatccactttataaaaaaggtaaatttgtctctattcaaatgtataatgcattgagtttcaatttttattacctaggaaataaagacgaaagtattgagatgtggaacaagctcactcaaatttctaaagttgatgttggttatgcaccttgggtaattgaggaaagtaaaacggtatttgaatcacgattgttaccattattactagatgataataatcattatcgactttacggtatttttttacttcatcaattaaatggaaaagaaatactaatgactgaagatatttggtcaattcttgaatcaatgaatgactatgagaaactttatctcacatatttggtacaaggactcacactcaataaattagattttatacacagaggtatgcaaaggttgtataattttaagaaattcaaatataacacgtctttatttacagattggattaatcaagcagaaatgattatatctgaaaatgtagatttagtagatgtcgatagatatgtagctgcatttgtttacctatcgtatcgtcgttctagccaaccacttaccaagaggcaattgatggacgattttaatgtttctagatacaaactgaataaagcaattgaatttatattgagcatataa

SEQ ID NO: 8758 - DNA, 933 bp, Staphylococcus epidermidis; identical to SEQ ID NO: 5006

SEQ ID NO: 8759 - DNA, 909 bp, Staphylococcus epidermidis
atgacaagcaacgaaaaagatatgggtaaaagtgaattgttagttgttacaggtatgtctggagcgggtaaatcattggtgattcaaagtctcgaagatatgggatttttctgtgtagataatttaccacctgtactattacctaaatttgtagaattgatggctcaaggaaatccttcattgcaaaaagtagcaattgcaatagatttaagaggtaaggaattatttaaatctctagttaaagaaattgatattattaaaagtcgtaatgacgtgattttagatgttatgtttttagaagctaaaactgaaaaaattatttcacgttataaagaatcaagaagagcgcacccactaaatgaacaaggacaaagatcattaatagatgcaataaatgaggaacgtgaacatctatcagaaatccgaagtatcgctaattacgtgattgatacaacaaaattaaaacctaaagaattaaagcaacgcatttcaaagttttatttagatgaaaactttgaaacatttacaatcaacgtgacaagtttcggtttcaagcatggtatacaaatggatgctgatttagtttttgatgtcagatttctacctaatccctactatgtagaggaattgcgtccatttactggtttagatgagccagtgtacaattacgttatgaagtggaaagaaacccaaatattttttgataaattaacagatttattaaaatttatgattcctggctacaaaaaagaaggtaaatcgcaattggttattgctataggttgtacgggtggacaacatcgatcagtcgcattagctaaacgtttagctgaatatcttaacgagatttttgaatataatgtttatgtgcatcatagagatgcgcatattgaaagtggagagagataa

SEQ ID NO: 8760 - DNA, 996 bp, Staphylococcus epidermidis; identical to SEQ ID NO: 5004

SEQ ID NO: 8761 - DNA, 945 bp, Staphylococcus epidermidis; identical to SEQ ID NO: 5003

SEQ ID NO: 8762 - DNA, 585 bp, Staphylococcus epidermidis; identical to SEQ ID NO: 5002

SEQ ID NO: 8763 - DNA, 192 bp, Staphylococcus epidermidis
atgaaagatactcagttaacatatatattattaatcattgcaagtattttattaattgctaatggtatatttgcatttgaacgtacgttatcaatgatattaatgtcgatattatttatattagttggaatcattttattatcaacaacattgaataccatgtaccaatcatcaaaacactcaaaacgttaa

SEQ ID NO: 8764 - DNA, 900 bp, Staphylococcus epidermidis; identical to SEQ ID NO: 5000

SEQ ID NO: 8765 - DNA, 612 bp, Staphylococcus epidermidis
atgagcggtatctccaaatttattagtgcgattgtagttttgctattattaataggtttagcatttggtatttactcatttgtcgatagttcaaaaaaaggtaacgaacgactcagtgataaaacaacacagcaagaaaagaaaaaagacgataaagacaaaaaggaaaaaaaagataaaaaatcggtggaagaaaaaaagaataatacacaacaaacgcaacaagttcctcaaactcaacaaacgcaacaaactgttcaaacgccacaaagacctacaactcaaactccggtgagacaaaatccacaaacaggagaaaagagagcaaaagaaccaaaaactgatgaaagaaaaaaaactagacaagacagttcaaattctaaagaaagcccaaatgaaaaagatcaatcgtcaacacaacaaaagccacaacaaaataaatctaaccagtcatcagagaatcgtcaaagtacccaaaataaatcaaatcaaacacagtcaaccagaccacaaaacaatggaaatagtggcaatcaaaatgctagttcggggcagaacacacaaaaacaaaataataacaatcaaaattctcaaagctcaaaaaaggattaa

SEQ ID NO: 8766 - DNA, 237 bp, Staphylococcus epidermidis; identical to SEQ ID NO: 4998

SEQ ID NO: 8767 - DNA, 1014 bp, Staphylococcus epidermidis; identical to SEQ ID NO: 4997

SEQ ID NO: 8768 - DNA, 1011 bp, Staphylococcus epidermidis; identical to SEQ ID NO: 4996

SEQ ID NO: 8769 - DNA, 1191 bp, Staphylococcus epidermidis
atggctaaaaaaatcgtttcagacttagatttaaaaggtaaagttgttcttgagcgcgctgattttaacgttccaattaaagatggtgaaatcactaatgacaacagaattgttcaagcattaccaacaatcgaatatattattgaacaaggtggtaaattagttttattctctcacttaggtaaagttaaagaagagagtgataaagaaggactttcacttaagcctgttgctgaaaacttatctaagaaattaggtaaagaagttatattcgttcctgaaacacgtggcgaaaaactcgaaacagcaattgaaaacttaaatgaaggcgatgttttattagttgaaaatacacgtttcgaagatttagatggtaaaaaagaatctaaaaatgatcctgaattaggtaaatattgggcatcattaggtgatgtatttgttaatgatgcatttggtacagcgcaccgtgaacatgcgtcaaacgtaggtatttctactcatctagaaacagcagctggttacttaatggaaaaagaaattaaatttattggtggcgtagtgaatgatccacaaaaaccagtagttgctattttaggtggcgctaaagtttcagataaaattaatgttatcaaaaatttagttaatatcgcagataaaatcttaatcggtggcggtatggcttatacatttattaaagcgcaaggtaaggaaataggtctttcattattggaagaagacaaaattgattttgctaaagacttgttagagaataatggcgatcaaatagtattacctgtagattgtaaaatcgctaaagaattttctaatgatgcaaaaatcactgaagtatctatcaatgaaatcccttcagatcaagaagcaatggatattggacctaaaacagtagaattatttaataaagaattacaaggtgcacatactgtagtatggaatggacctatgggtgtattcgaatttagtaattttgctaaaggtacaatcggtgtatgtgagtctattgctaaattggaagacgctactactattattggtggtggtgactctgccgcagcagcaatttcattaggtttcgaagatgactttacacacatctctactggtggaggagcatcattagaatacttagaaggtaaagaattacctggtataaaagctattaatgataaataa

SEQ ID NO: 8770 - DNA, 762 bp, Staphylococcus epidermidis; identical to SEQ ID NO: 2580

SEQ ID NO: 8771 - DNA, 1518 bp, Staphylococcus epidermidis; identical to SEQ ID NO: 4993

SEQ ID NO: 8772 - DNA, 1305 bp, Staphylococcus epidermidis
atgccaattattacagatgtttacgctcgcgaagtcttagactcacgtggtaacccaacagttgaagttgaagtattaactgaaagcggtgctttcggacgtgcattagtaccttctggtgcttctactggtgaacatgaagcagttgaattacgtgatggagataaatcacgttatttaggtaaaggtgtgactaaagcggtagaaaatgttaacgaaatgatcgcaccagaaatcgttgaaggtgaattttcagttttagatcaagtatctattgataaaatgatgattcaattagacggtacacacaacaaaggtaaattaggtgcaaatgccattttaggtgtttctattgccgtagctcgtgcagctgctgacttattaggtcaaccattatataaatatttaggtggatttaatggtaaacaattgccagtacctatgatgaatattgttaatggtggttctcactcagatgcaccaattgctttccaagagttcatgattttacctgtaggtgctgagtcattcaaagaatcattacgttggggtgcagaaatcttccataaccttaaatcaatcttaagtgaacgtggtttagaaactgcagtaggtgatgaaggtggtttcgctcctagatttgaaggcactgaagacgctgtagaaactattattaaagctatcgaaaaagcaggatacaaaccaggtgaagatgtattcttaggatttgactgtgcttcttctgaattctatgaaaatggtgtttatgattacactaaattcgaaggtgaacacggtgctaaacgtagtgcagcagagcaagttgactacttagaagaattaattggtaaatatccaatcatcactattgaagatggtatggatgaaaacgattgggaaggttggaaacaattaactgatcgtatcggtgataaagttcaattagttggtgatgatttattcgtaactaacactgaaattttatctaaaggtatcgaacaaggtattggtaactcaatcttaatcaaagtaaaccaaatcggtacattaactgaaacattcgatgctattgaaatggctcaaaaagctggatatactgcggttgtatctcaccgttctggtgaaactgaagatactacaattgctgatatcgcagttgctacaaatgcaggccaaattaaaacaggttcattatctagaactgaccgtattgctaaatacaatcaattattacgtattgaagatgaattatacgaaacagctaaatttgaaggaattaaatctttctacaatttagataaataa

SEQ ID NO: 8773 - DNA, 459 bp, Staphylococcus epidermidis; identical to SEQ ID NO: 2577

SEQ ID NO: 8774 - DNA, 234 bp, Staphylococcus epidermidis; identical to SEQ ID NO: 2576

SEQ ID NO: 8775 - DNA, 741 bp, Staphylococcus epidermidis; identical to SEQ ID NO: 2575

SEQ ID NO: 8776 - DNA, 2379 bp, Staphylococcus epidermidis
atgaatttaaagcaatccatcgaagaaatgataaaacaacctgactatgaacccatgtcagtatctgactttcaagatgcgttaggtttaaacagtgccgactcatttagagatttaattaaaatactcgttgaattagaacagtctggtttaattgaacgtacaagaacagacagatatcaacgtaaacaatccaacaaaacaaattcaaaactaatcaaaggaacgttaagtcaaaataaaaaaggctttgctttcttaagacctgaagatgacgagatggatgatatttttattccaccaactaaaatcaatagagcattagatggagatactgtcatcgtggaaattcaaaaatctcgtggagaacataaaggtaaaattgaaggtgaagtaaaatctattgaaaagcattcagttacacaagttgttggaacgtatagcgaagcaaagcattttggtttcgtattaccggatgacaaacgtattatgcaagatatctttatacctaaaggacaaaatttaggtgctgtagatggtcataaagtattagtacaaattacgaagtatgccgatagtactgacaatccagaaggccacgtttcagcaatattaggtcataaaaatgatccaggtgtagatatactttccatcatttaccagcatggaatagaaatcgagtttccagatgatgtattacaagaagctgaagaagtaccggatgtaatagaaccatctgaaatcgaagggcgtcgtgatttaagagatgaattaacaatcactatagatggcgcagatgctaaagatttagatgatgccattgctgtaaaaaaattaaaaaatggcaacaccgagcttacagttagtattgcagatgtaagttactatgtaaaaaaaggatcagctttagataaagaagcatatgatcgtgcgacaagtgtgtatcttgtcgatcgagtaatcccgatgattccacaccgtctaagtaatggaatatgctcattaaatccggaagaagatcgtttaacattaagttgtcgaatggaaataaatgaacgaggcgaagttgtaaaacatgaaatctttgatagtgtaatacattcaaactacagaatgacatatgatgcagttaacaaaattatcactgatcaagattctgaaatacgttcacaatataaagatttaacacctatgttagatttagcgcaagatttatcaaatagattaattcgtatgcgcaaacgtcgtggagaaattgattttgatattaatgaagcgaaagtacttgtgaatgacgaaggtattccaacagaagtgctaatgagagaacgtggcgaaggagaacgtttaattgaatcattcatgttagcagccaatgaaacagtagctgaacacttcaataaattggaagtaccatttatttatcgtgttcatgaacaaccaaaatctgaccgattaagacagttcttcgactttattaccaattttggtattatgattaaaggtacaggtgaagatattcatccaacaacattacaaaacattcaagaagaagttgaaggtagaccagaacaaatggttatttcaacgatgatgttacgttctatgcaacaagcacattatgatgatgttaatttaggacattttggtttgtctgctgagtactatactcactttacgtctccaatacgccgttatcctgatttaacagtgcatagattaattcgtaaatatttaatagagaattctatggataaaaaagaaatacgtcattgggaagagacgttgccagaattagctgagcacacatcacaacgtgaacgccgtgccattgaagccgaacgtgatactgatgaattgaaaaaagctgagtatatgattcaacatattggtgatgaatttgaaggtatcattagctcggttgctaattttggtatgtttatagaattacctaatactattgagggtatggttcatatcgctaatatgacagacgattattatcattttgatgaacgacaaatggcactaatcggtgaacgtcaagcaaaggtctttcgcattggtgatgcggtcaaagttaaagtgacacatgttgatgtggaagaacgcatgatagatttccaaattgttggcatgccattacctaaaaagacatcatcacaacgacctgctcgtgagaaaaccattcaagctaaaacacgtggcaagtcgttagaccatactaaaagtgatcgtaatggtaaaggtaaaaagaaaaaacgtaagcaacgtaaaggtaaaaatgctcgtaaaaaagataaacaaggtaatacgcaccacaaacctttttataaagataaaagtgtgaagaaaaaatcacgtcgaaagaaaaaatag

SEQ ID NO: 8777 - DNA, 471 bp, Staphylococcus epidermidis; identical to SEQ ID NO: 4987

SEQ ID NO: 8778 - DNA, 675 bp, Staphylococcus epidermidis; identical to SEQ ID NO: 4986

SEQ ID NO: 8779 - DNA, 447 bp, Staphylococcus epidermidis
atgatgattttcatacatataaataaaacggactatcacggtgaagtgacagcccctaaaacaaaagcagcaatacgtgatatatacctaccttttcatatgatgaatgacatagaaaaatatttaaaatggtacaaagaaaacaatgtatataaagatgattatgtattattcggtacattcttcaaggcatacagtgaatcaactatagatcgttggtttaccactgcattaaaagtgttagatgaacaactgccagacgttcagacattccctagaatcgttatacatgaattaagacatagccatgcgtctatgctagtcaatcatggtgcaagtatcatggtaatagcacagcgtttaggtcatgctgatagtaatgaagtatataaccgatacggtcatttgtaccctagtacgcagaaagaaatagttaaatacttgtaa

SEQ ID NO: 8780 - DNA, 180 bp, Staphylococcus epidermidis; identical to SEQ ID NO: 2570

SEQ ID NO: 8781 - DNA, 543 bp, Staphylococcus epidermidis; identical to SEQ ID NO: 2569

SEQ ID NO: 8782 - DNA, 126 bp, Staphylococcus epidermidis; identical to SEQ ID NO: 2568

SEQ ID NO: 8783 - DNA, 171 bp, Staphylococcus epidermidis; identical to SEQ ID NO: 2567

SEQ ID NO: 8784 - DNA, 234 bp, Staphylococcus epidermidis; identical to SEQ ID NO: 2566

SEQ ID NO: 8785 - DNA, 1308 bp, Staphylococcus epidermidis
atgagcaaagtaaataaacctttatatttctatcttatgttatttctgttgacaactttaattggtgcttttctactctatttgccctatacagggaagaaacccattaactttattgacgcattgtttgtagcttctagcgcattcacagtaacaggtctatcaccagttgatgttggaacacaatttaatatttttggagaaatcattatcttattacttatacaaattggtggattaggtattgtcactgtagcaatgctaactctcatctttttaaataagaaaatatcaattaacaatagaattttatttatgattacttgtaatattgacgaacccggtggtgtaattaaacttattaaacatctagccatatacagcatcgccactgaattatttggtacactttgtctatgtttatcgtttattccaaaatttggcataggtaaaggtctatttttaagtttattcacttcagtttccgcatttaacaacgcaggattcgccctttttaaaaacaacttaatcgatttttcaaatgatccggtaatcattatcactattccaatacttatcattttgggaggtttgggacatttagtcgtggttgatttgtggaacgccaaaagttttagaaaattatccttacactctaaactcgtgttaactaccactggattattaattttgataggcacggttttcttctttttactagaaaatcaaaactctatgttacacatgggattaattgaaaaaataggaaatgcatttttccaatcagtgacaacaaggactgcaggatttaacacaattgacgttggaaacattaaaacaccgacagctttattacttatggctctcatgtttattggaggtgcaccattgagtgctgcaggtggtataaaggttacaacttttgttattgcaacaatcgctatttttaatacgatacgcaaagaaaaaaacaactctatatttaatagagaaatatcagaaagatacatacagttgtctttcgtaactattctcatttctattgcatttatcggtatggttacgtttatacttaccataatcaattccaatatacctttaatcaaaatactcttcgaagtcgtatcagcattcggtacagtcggtctcactatggatttaacttccgaatactataattggactgagtttattattatcatcgtaatgttatgtggtaaaattggattactgaatattagtagagcgcttgttccacctaaagaccctaaaaattatagatataccaaaggacacattcacttataa

SEQ ID NO: 8786 - DNA, 345 bp, Staphylococcus epidermidis; identical to SEQ ID NO: 4978

SEQ ID NO: 8787 - DNA, 417 bp, Staphylococcus epidermidis
atggaattatatagtatgcctatgtttaataaatttttagttaacgacatagagaaatcatcggaatggtatcaagagaatttaggttttaaaagtatttttaaatttaaaaatgaacaaaatcaaattttaatggagcatttacgattagcaaaatatcaagatttgatgttaatttctggcaaacagtttgaagtcggtaatgcagtttatacaaatatacttgtaccaaatattcgaattttaaaacaacgaatatcttctcaatatatcgtggaagatcttgaaggaaaaccatggaattctattgaaatgacaattaaagatttagataatcatttaattacgcttacacaaagtaacataaaaaatgaagaatttaatgctttgatgcaacatacttcaaaaactttttaa

SEQ ID NO: 8788 - DNA, 117 bp, Staphylococcus epidermidis
atgtcaaatcaagaatggagaaataaaacaaggaatagactatcatctagtgagatgcaaattcgtgacgaaattctcaatgataattatgaagagataacgcacagaaagttctag

SEQ ID NO: 8789 - DNA, 504 bp, Staphylococcus epidermidis; identical to SEQ ID NO: 2561

SEQ ID NO: 8790 - DNA, 126 bp, Staphylococcus epidermidis; identical to SEQ ID NO: 2560

SEQ ID NO: 8791 - DNA, 942 bp, Staphylococcus epidermidis; identical to SEQ ID NO: 2559

SEQ ID NO: 8792 - DNA, 201 bp, Staphylococcus epidermidis; identical to SEQ ID NO: 2558

SEQ ID NO: 8793 - DNA, 225 bp, Staphylococcus epidermidis; identical to SEQ ID NO: 6449

SEQ ID NO: 8794 - DNA, 285 bp, Staphylococcus epidermidis
atggaaaaccttacaaaagaacaaaaatatacaatagctaaattttataaattatatatggaaagatctaatgcggggcaaccagaagaagaagctaatcattttaaagattctgtaacggcacaagatgattatttttgtgatagaaaatatgaagatttcattcataactgtaaagtcttaataaatgaaggttacttagatggcgaggttgaagataacaaaatatataatattcaggttacaacaaaagcttttacagaaattgagcgtagctttggttaa

SEQ ID NO: 8795 - DNA, 747 bp, Staphylococcus epidermidis
atgagagacaaagacaatcaacattcgagattatattatattattttgacaatcgttattatcgcaatttgcgttgttgttgtaatactttttaatactttaaagacaaaccgttctcattctaccgatagatacgcagattttactgaattaaaaaaagatacgataaaaaataaagattggcgtattaaaacaaaacaccgtaaaaataaggatattttagtcactgcaattcacggtggaggtatcgaaccaggtacgactgaaattgcacgacgtatttccaatgttggaaaatataatttttatacctttgaaggtcttcgaaagtctaataacgatcaactacatgtaacatccactcattttaacgaacctatattagataagttacttaaaaacactaaagaaacattatctatacatggattctctggagatgaccctattgtttatatcggaggtaaagataaagagatgtctcactctatcacgaaagaattacgtaaaaaagactttactgtaaaagaaagtcctaacaaaatcgatgcaaagtcatcagataacatagctaataaaaatgaatctaactcaggtgtccaattagaactcacgactgcattgcgaaaacagtttttcaaacattataaattagatcgacatacacgtagtgattcagataaatatactaaagatttttacaaatttgcgaacgcagtgcaaaaaggtatcgaaaaggtaaattaa

SEQ ID NO: 8796 - DNA, 234 bp, Staphylococcus epidermidis; identical to SEQ ID NO: 6452

SEQ ID NO: 8797 - DNA, 555 bp, Staphylococcus epidermidis
atgaaattaatatctaaaaacatatacttatcatttatattttttatttttagtctcatgttatttaccaatcaaagtttcgctaatgataataaacgttttcagctaaaaccaggtgacattattgttacaaaaggtcctgttttaaatggtttttttggtcactgtagtttggcaattgatcatgacactgtacttcaaattgaaggtccaggggataaaccaatgacggaagattttgaatcttatcgtgacagatatggaaaaggtaaaaatgaatggataaaagtctatcgatgttcacaccctaacgctggaacaaaagcagctcaatgggcaaagaaacattatgagaatagcgatagcgaatatcttgttacattcaacttaaaaagtgaaacatttacatattgcactaaaattatatatcaagcatataaatacggcgtagataaaaattccgtaagtgatcacggtttatatattatttcaccctatgcgctaacagataattttacagatgaatataaattaaaattagtaaaaacatattaa

SEQ ID NO: 8798 - DNA, 189 bp, Staphylococcus epidermidis
atgagcttacatttccaaattttgctgtggctttctatcttatttatcatcgcaggaacgatattattggtaacaatgcttaaaactaaaaaagaagaacgaaaagaatcttatctaggctttactgtaattttcttaatctttggttttgccatcttaatttatacttttatattcggaattttataa

SEQ ID NO: 8799 - DNA, 138 bp, Staphylococcus epidermidis; identical to SEQ ID NO: 6455

SEQ ID NO: 8800 - DNA, 204 bp, Staphylococcus epidermidis
atgtctttttatgattttattttaggatttatcaatgacgatacgccactaggtcatttagcacaatacatttttaatgatgcttgtttcccaaaggaagagaaaaataataattctataagaacctatgtgcttcttaattataatgatcgtcagttaatcgaaagtacaaatcgtgcaattagtctatatcaattaatttga

SEQ ID NO: 8801 - DNA, 240 bp, Staphylococcus epidermidis; identical to SEQ ID NO: 6457

SEQ ID NO: 8802 - DNA, 588 bp, Staphylococcus epidermidis
ttggttaaaacattatatttaatgagacatggtcaaacagtatttaacttaaaaggtaaaatacaaggggctagtgattctcctttgactgcattaggtgtacaacaagcgaatgcagcacaacaatattttaaaacgaaaaatattcattttgactatctttattcatcaccacaacaaagagcatgtgacacgttagagaacgctgtaccaaaccaacgatattggtgtgtaaaagatcttaaagagtgggggtttggattatttgaaggggaaagtatcgagttattaagagctattaaacaacctagatatttgtatggtgacgctgttgtaccatttggtggagaatcaagatctgaagttgaacacagggtttatcgagcactctatgaaatgatggatacaacagatggagagacaattctagcagtgagtcatggtagcactattggtttgtttgtaagaaatatattagggtatgacaagggaagtaaatttgaaataggaaattgtaacattgtaaaatttgaatacgatggagaagaatttatctttaaagatttaattaatcccattaaaaaatag

SEQ ID NO: 8803 - DNA, 501 bp, Staphylococcus epidermidis
atgaacaatatccgtttattgaatcaaaacgatttggattcctatattgaattaatgaaatttggtcaccataattatgaatgggatcgttactatttagaaaatgttagcattgatagactcaaaactatcttgtctaatcatactgattattggaatatatttggtgcttttgaagatgatgaacttgttgcaacatgcactttaaaacaaatgaattatgtaggtaaatgccataaagctattcttgaaaataattttgttaaaaataatgatgaaattgttaaccgagaattaattaatcatattattcaatacgctaaagaacaaaatattgaaacattgatgattgctattgcatcaaacaatataagtgctaaagtgttctttagttctataggttttgaaaatcttgcttttgaaaaaaacgctagcaaaattggcaatgaatattttgacgaaaattggctcatttattcaacaactgagtcatcagattaa

SEQ ID NO: 8804 - DNA, 741 bp, Staphylococcus epidermidis; identical to SEQ ID NO: 7029

SEQ ID NO: 8805 - DNA, 261 bp, Staphylococcus epidermidis; identical to SEQ ID NO: 3598

SEQ ID NO: 8806 - DNA, 1068 bp, Staphylococcus epidermidis
atgtcacaatataaaacaaaacacattaatgatttcactaaaaaagaattacaagaattgggttctaagggtcaattaattgacgttcgacagcctgaagaatttgaattaggacacattaaaaatgctttattacattcagttgaaaatatagagacttttaaacaaagcaaaaataaaacttactatatctattgtaaaagtgataatcgaagtagaaaagccagtcaatttcttgcacaacgcggatacgatgtggtgaatttagacggaggttataccgcatacgaagaacaacatcataatgataatttatctaaagtaaaagaagatagagaaattaaagataatcgtaagacattcaattatagtaatctacagtgtccaggacctattgttaatattagtaaagaaatcaaaaacatcgctattggtgatcaaatagaagttgttgtgactgatcacggatttttaaatgatattaaaagttgggtcaaacaaactggacatacgcttgttagactcaacgattttggtaatgaaattcgcgctattattcaaaaagaagaaaataaaaatatagaagtgacacacacgaaaagtggaacaacaattgttttatttagcggcgagctagataaagcagttgcagcaatgattattgctaatggtgctaaagctgcaggtagagatgtaaccatcttttgcacattttggggcttaaatgcacttaaaaaaattcaaagtcaacgcattaagaaaaaaggtatcgcaaaactttttgacttcatgcttccaaattcaccaattaacatgcctatttctaaaatgaatatgtttggtttaggcaatctaatgatgcgttatgtcatgaaaaagaaaaatgtcgatactttaccttctcttattgatcaagcagttgagcaaggtgttaaacttatcgcttgtacaatgagtatggatgtgatgggcattacaaaagaagaattacgcgatgatgtagaatacggtggcgtaggtgcatatattggatatacagaacaagctaatcacaatttatttatataa

SEQ ID NO: 8807 - DNA, 1329 bp, Staphylococcus epidermidis
atgttttttaaacaattttatgataaacatttatctcaagcatcttatttaatcggttgtcaaaaaactggagaagccatgattattgatcctattcgtgacttatcttcatatattcgagttgctgatgaagaaggtttaaccattactcatgcagctgaaacacatatacatgcagattttgcttcaggaattagagatgttgctataaagttaaatgctagtatttatgtatcgggtgaaagtgatgacacgttaggttataaaaatatgcctaaccagactcattttgttcaacataatgatgatatttatgtaggaaatataaaattaaaagtgcttcatacacctggtcacacgccagaaagtataagttttttacttactgatgaaggtgctggagcacaagttccaatgggactattcagtggtgattttatttttgtaggagatatcggtagacctgatttactagaaaaagctgttaaagtagaaggatcatctgaaataggcgctaaacaaatgtttaaatctattgaaagtattaaagacttgccaaactacattcaaatttggcctggccatggagctggtagtccttgtggtaaatctttaggtgctattccaacatctactcttggctatgaaaaacaaacaaactgggctttttctgaaaataacgaagctacctttatcgataaactaatttctgaccaacctgcaccaccacatcattttgcacaaatgaaaaaaattaatcaattcggtatgaatttatatcaaccttatacggtttatccagctacaaatacaaacagattaacttttgatctccgcagtaaggaggcttatcatggtggacatattgaaggtacaatcaatattccatatgataaaaatttcatcaatcaaattggctggtatctaaactatgatcaagaaattaacttgattggagaatatcaccttgtttcaaaagcaacacacaccttacaactcattggatatgatgatattgctggatatcaattacctcaatctaagattcaaacacgttccattcatagtgaagatattacaggtaacgaatcacatatattagatgtacgtaatgataatgaatggaataatggccacttatctcaagcggttcatgtaccacacggcaaacttttagaaacagatttacctttcaatagaaacgatgttatttatgtacactgtcagtctggcattagaagttcgatagctattggtattttagaacataaaggttatcacaacattattaatgtaaatgaaggttacaaagatatacacctttcttaa

SEQ ID NO: 8808 - DNA, 546 bp, Staphylococcus epidermidis
atgattaaaaaattattttttatgatattaggatcattactaatattatcagcttgctccaataatgatgaaaaagataaagacactaatgatcaaaaaagtgagagccatatgaagcataatgatgaaagtaaagttcctgaagatatgacatcgactaatgagggagaatttaaagtaggagataaagtaacgattacagcagggcatatgccaggtatgaaaggtgcagaagctactgtaaaaggtgcgtataaaacatatgcctatgttgtaagttataaacccacaaatggaaatgaaaaagtaaacaatcataaatgggtcgtaaacgaagagatcaaagatgcacctaaagatggatttagtaaaggcgatactgttaaattagaagcaagtcatatgtctggtatgaaaggtactacagccaatatagataacgtgaaaaagactactgtttacgtagttgattacaaatccaaagataatggtaaaatcattaaaaatcataaatggatgacaggaaatgagctgaaagcacgataa

SEQ ID NO: 8809 - DNA, 2064 bp, Staphylococcus epidermidis
ttgaataataatggtgaagcgcataatcatcaaaatcacatgaatcattctaatcaaatgcatcatgataaccatgaatcacataatcatcatagtggccatgcacatcatcatggaaattttaaagttaagttttttgtttcattaatttttgcaatacctatcattcttttatcgccactgatgggtgttaacttaccttttcaattcacatttccaggttctgaatgggtagtgttaatattaagtacaattttattcttttatggtggtaaaccgttcttgtctggtggtaaagatgaaattgctacaaaaaaaccaggtatgatgaccttagttgccctaggtatttcagtagcttatatttatagcttgtatgctttttatatgaataactttagtagtgccactggtcatacaatggactttttttgggaattagcaaccttaattttaattatgctattaggacattggatagaaatgaatgctgtcggaaatgctggagatgctttaaagaaaatggcagaactgttacctaatagtgctattaaagttatggataatggccaacgcgaagaagttaaaatatcagacatcatgactgatgatatcgtcgaagtaaaagccggagaaagcattccaacagatggtattatcgttcaaggacaaacatctatagatgaatccctagtcactggagaatctaaaaaagtacaaaaaaatcaaaatgacaacgtcatcgggggttctattaatgggtctggaacaatacaagtcaaggttacagctgttggagaagatggatatctttctcaagttatgggacttgttaatcaagcacaaaatgataaatctagtgctgaattgttatctgataaagtggcgggttatttattctactttgctgtaagtgttggcgtgatttcttttattgtctggatgctcattcaaaatgatgttgattttgcattagaacgtcttgtaactgtgttagtcattgcttgtccacatgctttaggcttggcaatacctttagtcactgcacgttctacttcaattggtgcacataatggtttaattattaaaaatagagagtctgtagaaatagctcaacatatcgattatgtaatgatggataagactggtactttaactgagggtaacttttctgtgaatcattatgagagctttaaaaatgatttgagtaatgatacaatactaagccttttcgcctcattagaaagtcaatctaatcacccattagctataagtattgttgattttgcgaaaagtaaaaatgtttcatttactaatccacaagacgttaataatattccaggtgtcggattagaaggtctaattcataataaaacatataaaataacaaatgtctcttatcttgatcagcacggatttgaatatgacaatgacttatttataaaattagctcaacaaggtaattcaatcagctatttaattgaggatcaacaagtcattggcatgattgctcaaggagatcaaattaaagaaagctcaaaacaaatggtagctgatttactatcaagaaatattacaccagtcatgcttacaggtgacaataatgaagtggcacacgctgtcgcaaaagaattaggtattagtgatgtccatgcacaactcatgccagaagataaggaaaacattataaaagattatcaaagtaacggtaataaagtcatgatggtcggagacggtatcaacgatgcgccgagccttataagagccgatattggtatagcaattggtgcaggcacagatgttgcagtggattcaggtgatatcatacttgttaaaagtaatccatcagatatcattcatttcttgactctttcaaataatactatgagaaaaatggttcaaaacttatggtggggtgcaggttataatattgttgctgtacctttagcagctggtattttagcatttatcggcttgattttatcacctgcaataggtgctattttaatgtcattaagtacggttatcgttgcaattaatgcctttacattaaaattgaaataa

SEQ ID NO: 8810 - DNA, 159 bp, Staphylococcus epidermidis; identical to SEQ ID NO: 3502

SEQ ID NO: 8811 - DNA, 1140 bp, Staphylococcus epidermidis
atgaaaaaaatatggattttaactataggtatgtttgccttaggtatggatgcttatatagtagcaggattaataccttcaataagtaaaagttttaataaaagtagctctgctattgggcaaggagtaacagtttttacattgtttttctctatctctgcccccattttttcaacaatattagctaaatccccagttaaaaaaatactaataatagcattcagtatatttactttagccaatattataaccgcaatatctatgaactacatgctatatatcgtatcaagagcaatcgctggtttaggagctggcgtatcctcaccaattgcaataagtgcaagcaatcatttagtctccgaaaagcataaaggaaaagcaatcgcttttacagtaggcggaatgagtgtaggaactgttataggagttcctctcggactagaaattgccaacatttctaattggcgatttgcaatgttggttattattgtcattagttttattgcattaataagcatatctatattgatgcctaaatttaaaatagaagctcctccaaatttaaaagatcgttttcaattatttttaaacaagcatgtactaagagttatttcggttacattatgcgctgccattgctagtttaggtttgtatacttatttagccgatattattaaaacaaatacagatacaaaaaatttaactcattaccttacagcgtggggaataggcggattaataggaagttttggtataggatttattatagatagatttaaaaatacaagatttgttatgctaattattttaattttactagcattaagttttggtttaattcctatttctattaacttgcctatattaggtttaattccctttattttatggggagctatgggatgggctacacaagctcctcaacaacatatattattgaaaaaacatcctgaatatggaggctctgctgtcgctttaaatagttctattaattatttaggcagtgctatgggatcagcaatcggaggaattattttatttaatgctaatagtacaaatgtactaatatatagtgctttaggaattactattattggtattttattacaattactaaatttatccctagaaaaaaattaa

SEQ ID NO: 8812 - DNA, 822 bp, Staphylococcus epidermidis; identical to SEQ ID NO: 3504

SEQ ID NO: 8813 - DNA, 732 bp, Staphylococcus epidermidis; identical to SEQ ID NO: 3505

SEQ ID NO: 8814 - DNA, 600 bp, Staphylococcus epidermidis; identical to SEQ ID NO: 3506

SEQ ID NO: 8815 - DNA, 339 bp, Staphylococcus epidermidis; identical to SEQ ID NO: 3511

SEQ ID NO: 8816 - DNA, 1209 bp, Staphylococcus epidermidis
ttgaaattagcttggaatacgcaaaaaaataaaatgagcgatgttaaaggcaaagagatggaacaagaacgtaaagggagaatcaaaaacgatgagattgatttgaaacggacaaacttaaactttgatttagttgaagatgaacgtcatttgtatcatcgtgtgaaagatagagtcgattattataaagaacaggggtcacgtgtacagaaaaatagtgtggtgatgtattccaatatcattacgttatcaaaagaagaggccgaccgtatgggagaaacacgtacaaaacactactttaagacatgtaaagattacttcagtgaacgttttggcgaagtcaatgtcgtttcagcgaaagtgcatatggatgaatcagcgcctcatatgcaccttcactttatacctgtgaatcatcaagggcggttatcagcacgtacagctatgaatcgacaagccattcatcacatccatgatgaattaacaacacatctgtgccagcaaggttttgatgttgaacgtgggagtaccgatgataataaaacgtatattcaagatattcatgaatataaaaagaaagcgaaagttttaagtgaattagaccaagaaattgaaacgaaaaaacaattgttgagggatatcaacgatttacacgatgaaaaagaagatttaactcgggatattcaaaacttaaaacggaaaaatcattttttacaagaggattctcaacaggctcaagaagatatcgacctatacaagcaactgagaacgatttctagggacgattttagaaaagatgaggaaaagtaccaaaaagaaatcaaagcgtatgaggcgtctctgagtggccttagaatgaattaccgagatttggacaagcgcaatcaacatttaacaacacaaaataatcaactcgaacaccatttagacatgttaaatgcacgtcatcaagcgatgaacgccatggtaagaaatgatacacgtattttgtttgcgggacttagatgtgcattgaaagataggaatattgaattaagcgcagaaattaaatatcaacgtatgccagaagtcggtattgatcccgatacggtggatcagggggctttaacacatgcatatcaaggtgatgtgtcagggatagaccatcatataagaaaggcatcagcacctattaaaaaagagacagagaatgacttagaattagaataa

SEQ ID NO: 8817 - DNA, 453 bp, Staphylococcus epidermidis; identical to SEQ ID NO: 3801

SEQ ID NO: 8818 - DNA, 375 bp, Staphylococcus epidermidis; identical to SEQ ID NO: 3800

SEQ ID NO: 8819 - DNA, 726 bp, Staphylococcus epidermidis; identical to SEQ ID NO: 3799

SEQ ID NO: 8820 - DNA, 567 bp, Staphylococcus epidermidis; identical to SEQ ID NO: 3798

SEQ ID NO: 8821 - DNA, 504 bp, Staphylococcus epidermidis; identical to SEQ ID NO: 4539

SEQ ID NO: 8822 - DNA, 1116 bp, Staphylococcus epidermidis
atgaaaattgggattcctaaagaaataaagaataatgagaatcgagtggggttatccccaagtggtgtacatgcacttgtagaccaaggacatgaagttttagtagaaacaaatgccggtctaggatcttactttgaagatggtgattatcaagaagccggtgccaaaattgttgatgagcagtcaaaagcttgggatgttgatatggtcatcaaagtcaaagaaccacttgaatcagaatacaaattctttaaagaagagttaatcttatttacttatttacaccttgcgaatgaacagaaattaactcaggcacttgtggacaacaaggttatatctattgcctatgaaactgtacaattaccagacggttctttaccgttattaacaccaatgagtgaagtggctggtagaatgtctacacaagtgggagctgaatttttacaaagatttaatggaggtatgggtatcttactaggtggcatacctggagtgcctaaaggtaaagtcactattattggtggcggtcaggcaggaacaaatgcagctaaaatagctttaggtttaggtgctgaagtgacaattttagatgttaatcctaaacgtttagaagaattagaggacttgtttgatggcagagtaagaacaataatgtcaaatccattaaatatagaaatgtatgtaaaagaaagtgatttagtcattggagcagtactgattccaggtgctaaagcgccaaacttagtgactgaagatatgataaaagaaatgaaagatggatcagtgattgtagatattgcgatagatcaaggtggaatctttgaaacaactgataagattactactcatgataatccgacttacactaaacatggtgtcgtgcattatgctgtagctaatatgccaggtgccgttccacgtacatctacaattggattgaacaatgcaacattaccttatgcgcaattattggctaataaaggttatcgtgaagcatttaaagtaaatcatccattatctctaggtctgaatacatttaatggacatgtgactaataagaatgtagctgatacatttaattttgaatacacttcaattgaagatgcattgaaataa

SEQ ID NO: 8823 - DNA, 1056 bp, Staphylococcus epidermidis
atgactaaaataaaagaaatcaaaaaagttttacaacaagaagatgctgatgcagcatggattacgacacccttaaacatcttttactttactgggtatcgaagtgagccacatgaaagactcttcgctttgcttattccatcaaatgaagagcctgttttattttgtccaaaaatggaagttgaagaagtaaaacaatcaccgtttaaaggtaaaatcatcggttatttagatactgaaaacccattcgacaaatactctaaaactttctctaaaatgctcattgaaagtgaacatcttacagttaaacgtcaaagagaactaacaaaagcctttaatatagaacactatcaagatgttgatcaatcaatcaaggacttacgcaatatcaaatcagaagatgaaattatcaatataaaaaaagcagctgcgttagctgataaatgtattgaaattggtaaatcctttcttaaagaaggtgttgaagaaagagaagttgtcaaccatatcgaaaacgaaataaaaaaatatggtgttaatgaaatgagtttcgacacgatggtactcttcggtgaccatgctgcttcaccacatggaacacccggtgacagaaaattacagcaaaatgagtttgtactatttgatttaggtgttgtataccatcattattgtagtgatatgacacgcacaattcattttggcacacctaataaggaagcacaaaatatatataatattgttttaaaagcagaaacagaagcaattaaatctattaaaccaggagttaccatcaaagatattgataaaatagctagagatatcatcgaagaagcaggttatggtgattacttcccacatagactaggtcatggattaggtcttgaagaacacgaatatcaagatatatcaagtgtaaataataatcaacttgaagcaggcatggtcattactatagagcctggcatatatgtccctcatgtggctggtgttagaattgaagatgatattttagtaactgaaaatggttatgaaatattaactcaatacgaaaaataa

SEQ ID NO: 8824 - DNA, 690 bp, Staphylococcus epidermidis
atgaaactttcatttcatggtcaatcaacaatttattttgaaggtaacggcaagaaagttatagttgatccatttatctctggcaacgataaatgtgacctagatgaacaaacgttagaggtagattacattatcttaacacatggtcacgctgaccattttggtgatgtagttgaattggctaatcgtaatcatgcaactgtgattggttcggcagaattacaaggatatttatctacttatcacggagtcgaaaatgttcatggcatgaacattggtgggaaggctaaatttgattttggaacagtcaaatttgttcaagcattccatagttctagctttacacatgacaatggtgtacctgtatatttaggtatgcctatgggaattattgtcgaagctgaaggcaagactatctaccatactggggatacaggattatttagtgatatgaaactgatagcagatagacacccagttgatgtatgttttgttcctattggagataactttactatgggaatagaagatgctagttacgctattaatgaatttattaagcctacaatcagtgttcctattcattacaatacattcccgttaattgaacaagatccagagcaatttaaggatgcagttcaggtaggggaagtacaaattcttaaaccgggtgaatcagtggaattttaa

SEQ ID NO: 8825 - DNA, 894 bp, Staphylococcus epidermidis
atgagaatgaaagaagatcatatgaaaaatggacaacttaaaccggggtataatttacaaatagcgacaaattctcaatttgttttattttataatgtgtatcaaaatccgactgatacaagaacaatgataccttttttaaatacaatacaagagacctacggtcatttacctgaatatattgtagctgacgcaggttatggtagcgaagccaattatatggcaattatagataattttaatcgaacgccactcataacttatggaatgtttataaaagataaaactaaaaaatataaaagtgacatctttaatactcaaaattgggattatgacgaaattaacgatgaattcatttgtccgaataataaaagactaggatttaaaagatatgcctatcgtcatgataaatatggttttaaacgagactttatattatatgaatgtgatgattgttcagaatgccctctgaaacaacaatgtatgaacttcaattcaaaaacaaataaaaaaataatgaaaaattataattgggaatattttaaagcccaaattaataaaaagctttcagaaccaaaaacaaaaaccatctacagtcaaagaaaaattgatgtggagcctgtttttggatttatgaaggctattttgggtttcactagaatgtccgttcgagggatagataaagccaaaagagaattaggatttgtgctaatggcacttaatataagaaaagtaacagctcaacgagctgaaaataatcaaaaaaataataaaaaagacaatttctatattatttcaatagaaattgtctttttttacttatcctgggactttatgtcccacactctcttatttatatttcataaattcaaaataacaacttactattgttaa

SEQ ID NO: 8826 - DNA, 666 bp, Staphylococcus epidermidis
atggaaacttcagttcttatccccacaaatgatatttcacgacatgtaaatgatattgtagaaacaattcccgagactgaattcgatgaattcagacatcatcgaggtgcaacattataccatccaaaaatgatgttaaaagtagttttatttgcctacacccaatctgtgttttcaggacgtaagatagaaaaattactcaatgatagtatccgaatgatgtggctatcacaaaatcaaaagccttcttataaaacgattaatcgatttagagtaaatcccaaagtagacgctttattagaatcattattttttcaatttcatagtcagtgtttgaaacaaaatcttattgatgatcaggccatttttattgatggtacgaaagttgaggcaaatgccaatcgatatacatttgtatggaaaaagagtattcaaaaccatgagtcaagaatgaatgaaaactctaaagcactctatcatgaattggtgataaataaaatcatacctgagattaaaaaagatcatgataatgacttaacaaaagaagaaatagatttgattggtagtcatttagataaagaaatcgaagatttaaaccaacatatcgataatgaaaaatgtactaaaataagaaaacaaatacggctcaaaagaactaaaatttaa

SEQ ID NO: 8827 - DNA, 1059 bp, Staphylococcus epidermidis; identical to SEQ ID NO: 2804

SEQ ID NO: 8828 - DNA, 849 bp, Staphylococcus epidermidis
atgaaaaagagatttttatctatatgtacaatgacaattgcagcgttagcaactactacaatggtaaatacttcttatgcaaaaaccgatacagaaagccataatcattcctcacttggcacagaaaacaaaaatgttttagatattaatagttcgagttataatatcaaaccaagtcaaaataaaagttacccaagtgtaatattacctaataataatagacatcaaatttttaatactacacaaggtcattatgatgctgttagttttatttatataccaatagatggtggatatatgagtggttcaggtgttgttgtaggtgaaaatgaaatattaactaataaacacgttgttaatggagctaagggtaatccaagaaatattagtgtccatccttcagctaaaaatgaaaatgattatcctaatggcaaatttgtgggtcaagaaatcataccgtatcctggtaatagtgatttagcaatcttaagagtgtcaccaaacgaacataatcaacatattggtcaagtagttaaacctgcaactataagtagcaatacagacactagaattaatgaaaacatcactgttactggttaccctggtgacaaaccattagccacaatgtgggaaagtgtaggtaaagttgtctatattggtggcgaggaattaagatatgacctaagtactgtaggtggaaactctggatctccagtatttaatggtaaaaatcaagttattggaatacattatggtggcgtagataataaatacaatagcagtgtttatattaatgatttcgttcaacaattcctaagaaacaatatacctgatataaatattcagtaa

SEQ ID NO: 8829 - DNA, 144 bp, Staphylococcus epidermidis; identical to SEQ ID NO: 3536

SEQ ID NO: 8830 - DNA, 1008 bp, Staphylococcus epidermidis; identical to SEQ ID NO: 3555

SEQ ID NO: 8831 - DNA, 138 bp, Staphylococcus epidermidis; identical to SEQ ID NO: 3556

SEQ ID NO: 8832 - DNA, 186 bp, Staphylococcus epidermidis; identical to SEQ ID NO: 3557

SEQ ID NO: 8833 - DNA, 705 bp, Staphylococcus epidermidis; identical to SEQ ID NO: 3558

SEQ ID NO: 8834 - DNA, 360 bp, Staphylococcus epidermidis; identical to SEQ ID NO: 3559

SEQ ID NO: 8835 - DNA, 831 bp, Staphylococcus epidermidis; identical to SEQ ID NO: 6767

SEQ ID NO: 8836 - DNA, 183 bp, Staphylococcus epidermidis; identical to SEQ ID NO: 6765

SEQ ID NO: 8837 - DNA, 306 bp, Staphylococcus epidermidis
ttggaattcttgtatgtttgtaaaaaaattatggatattttgattagtatagtaacagttttggaagaagacgtagcaagaatgttagttaaaatcagagaaagaattaaaaaaggtggtttaattttaaaaattgttttatttttcacatattattttatttcttgttttattttgtcttccttatgtgatttattactttcaacaaaatttgatgtatatataaatgtaattgcagcattgatttttgcagtatgtatgacacctcttacttttatattaaaggacgataaaaacaagaaatag

SEQ ID NO: 8838 - DNA, 450 bp, Staphylococcus epidermidis
atggaaaatagttattttaagaataaagctaattatattacgcaagaagagtggatcaacttatggcaaaaagctcttcaagttgattacaaacctgtcgcaaatatcaaagcaattaaaccaaataaaaaaggtgataaagatatacaagcagcaattaaagagacatcaaaatactcggttaagtcgtctgattatttaacaggaaaccatgaaaaagacgcagaaattgttcaagatttggaacaaggtttatatagaaaacgtatgttaagttatggtggtttacttaaacaaaaacataaacttttaaatttagacgatgccgaagaaggtaatttaattcaaacgagcgatgaagaaaaaacgactgaagaagaacaaaaagcccattcaattacggccatttggaattttgaaaaacaaaattatttcttaaaaaatttgtaa

SEQ ID NO: 8839 - DNA, 147 bp, Staphylococcus epidermidis
atgagtattgcttcaacttcacatcatttaagacttttatataaaaatgaggtgcttgatttttataaagatggaaagatggcatattattttattaaagacgatgaaataagagagtttttctctaaaaatcagaaggttttttga

SEQ ID NO: 8840 - DNA, 345 bp, Staphylococcus epidermidis; identical to SEQ ID NO: 3495

SEQ ID NO: 8841 - DNA, 114 bp, Staphylococcus epidermidis; identical to SEQ ID NO: 3498

SEQ ID NO: 8842 - DNA, 168 bp, Staphylococcus epidermidis; identical to SEQ ID NO: 3499

SEQ ID NO: 8843 - DNA, 237 bp, Staphylococcus epidermidis
atgggtatgggtcatatgatgggcggaatggggttcattggcatgattttttggattatcattcttggcttgttattttatggtgtatatatattaattgcaaaagcttcagaaaaaccaaaaggtgtaagatcagatgattctttacaaattttaaaggaaaggctggcccaaggtgaaattaatgaagatgaatatgaatatgaaaaattaaagaaagtgttaaaaaaagattag

SEQ ID NO: 8844 - DNA, 246 bp, Staphylococcus epidermidis; identical to SEQ ID NO: 3501

SEQ ID NO: 8845 - DNA, 1362 bp, Staphylococcus epidermidis
ttgaaagtaaatccactttatttatcgttatatgaaaagttaaaaaatcaaattatcgaaggtcaatatcaatcaaatgatagatttccatctaaacgacagttaagtaactatttatctgttagccacactacaatagaacatgcatatcaattacttgtagatgagggtttcatttattcgaaacctagatctggctacttcgtttccgatatagaatcgttgccagtgatacatcgacaaacaaatcaattaaacactgataacttagaaaagaagcaacgacaatataaatatgcttttaatttagctgaaattgattctgaaagttttcctatgcacatttttagaaaatatgcgaaagacgtttttgaagaccatcagctatcactattacaacgaggcgagcgtcaaggggaatatattttaaggcaacaaatttcacattacttatttaatagtcgtggcgtcacttgtcgcccaaatcaaattattgttggatcatcaacaagccagttactcgatatgataaccaatttactaaaaaaagaagaatttattattgaacagccaagttatccacctattaaacatacgcttgataaaaaaggtataagttatattcaagtcccagttgaacaaaatggaatacaaatcgaccctattttaaatacaaataacaatattttgtatataacaccatctcatcaatttccaactggttatgtcaccaatttaaaaaaaagaacacaattaatcaattggtcccatcaagctaagcaaagatatattatcgaagatgattatgattcagaatttagatattttggcaaacccatacctgcattacaaagtttagacacaaaaggaaaagtcatttatattagtactttctcaaaatctttatatccaagctgtaggattgcatatattgttttgccacaaaatttaatgcacaaatataataatcaaaaatataaagagggaaatacagtgcctgtgcatgttcaacacatggttgctcaattcatgataagtgggaaatttgaaagacatttgaataaaatgcgaaagatatatagagataaacttgattatattttaaaacgattaaagccctacaatactcaaataaagattgaaggcgcactaactggaatgcattttacaataactgttaataatggattgtcaatgaaacaatgtttaaaaaatgcgaaaaaaaataatttaaaattaaaaccttatcattacgaaaattattctaaagtttatccaaaatttattttaggatttggggggataaaaaaagaagaattagaagatcatgttaatgcattaattcattcactcgttatataa

SEQ ID NO: 8846 - DNA, 888 bp, Staphylococcus epidermidis
atgtctaaaatagtaggatcagatcgagttaaaagaggaatggctgaaatgcaaaaaggcggtgtcattatggacgtcgttaatgcagaacaagctaaaattgctgaagaagccggagctgttgccgtaatggcattagagcgtgtaccatcagatattcgtgctgctggcggtgttgcacgtatggcgaatcctaaaatagttgaagaagttatgaatgccgtatcaattccggttatggctaaagccagaattggtcatattacagaagctagagttttagaatcgatgggtgttgactatatagatgagtctgaagtattaacgcctgcagacgaagaatatcatttaagaaaagatcaatttacagttccttttgtgtgtggctgtcgtaacttaggtgaagcagcacgacgcattggtgaaggtgcggcgatgttgcgtacgaaaggtgaacctggtactggtaatattgttgaagctgtccgtcatatgagacgtgttaattctgaagttagccgcttaacagttatgaatgatgatgaaattatgacatttgcaaaagatttgggtgcaccttatgaagtattaaaacaaattaaagataatggacgtcttcctgtagttaattttgcagctggtggtgttgctacgcctcaggatgcagcactaatgatggaattaggtgcagatggtgtatttgttggttcaggtatatttaaatctgaagattctgaaaaatttgctaaagctatcgttcaagctacaacacattatcaagattatgagttaatcggaaaattggctagtgagctaggtacggctatgaaaggtctagatattaatcaaatttcactagaagaaagaatgcaagagcgtggttggtaa

SEQ ID NO: 8847 - DNA, 561 bp, Staphylococcus epidermidis
atgattaaaattggtgttttagccttacaaggtgctgtacgtgaacatatacgtcatattgaattaagtggttatgaaggcattgctataaaaagagtagagcaactagatgaaattgatggtctaatattacctggtggagagtctacaacattacgtcgtttaatggatttatatggatttaaagaaaagttacaacaattagatttgccaatgtttggaacatgtgctggattaattgttcttgcaaaaaatgttgaaaatgagtctggttatttaaataaattagatataactgttgagcgtaattcattcggtagacaagtcgatagttttgaatctgaacttgatattaaagggatagcaaatgatattgagggagtatttattagagcacctcatattgctaaagtggataacggagtggaaatacttagtaaagttggaggtaaaatagtagccgtcaaacaaggacaatacctcggtgtttctttccatccagaactaactgatgattatcgtatcactaagtattttattgaacacatgattaaacattaa

SEQ ID NO: 8848 - DNA, 387 bp, Staphylococcus epidermidis; identical to SEQ ID NO: 3565

SEQ ID NO: 8849 - DNA, 120 bp, Staphylococcus epidermidis; identical to SEQ ID NO: 3564

SEQ ID NO: 8850 - DNA, 438 bp, Staphylococcus epidermidis; identical to SEQ ID NO: 3563

SEQ ID NO: 8851 - DNA, 180 bp, Staphylococcus epidermidis; identical to SEQ ID NO: 3562

SEQ ID NO: 8852 - DNA, 396 bp, Staphylococcus epidermidis; identical to SEQ ID NO: 3561

SEQ ID NO: 8853 - DNA, 750 bp, Staphylococcus epidermidis; identical to SEQ ID NO: 3560

SEQ ID NO: 8854 - DNA, 537 bp, Staphylococcus epidermidis; identical to SEQ ID NO: 6112

SEQ ID NO: 8855 - DNA, 822 bp, Staphylococcus epidermidis
atgttcaagaacaacaaaagtattgaagatacttatgcaacaaaacctattattcagaatatcgttggtcaggcacaaattaaacaagtgatggcgaaacaaacacccatgagatatacgttgaaagctatcatggctggttttctattatcaatagttacagtttttatgttagcaattaaaacacaattcgcttcaacgcataatgacggattaatcaatttgatgggagctattgcgtttagtttaggtctcgtattagttgtgttaaccaattctgaattattaactagtaattttatgtatctgactgttggttggtattataaagcaattagtgtaagtaaaatgatatggatttttattttctgttttatatgtaatatcttaggtggatttattttatttttcctaatgaaatatgcacatgttatgacgccagaaatgacagatagtttaacagcattagtacataaaaaaacagtagaatcgacttggttaaatattttgattaaaggtatattttgtaatttctttattaatatcggtatttttatttcaatgcagtttaaagagggactagccaaagcattctttatagcttgtggagtgattgtctttgtatttatgggttacgaacacgttgtttttaacgctggattatatgcaggtatgatgttctttaatatggatggattatcttggttgggtgtgctaaaaaatattgtttttgcattccttggaaactatatcggtggaggtatctttattggattagtgtatgcatatttgaacggtaaacgtgacagcctccaaccatag

SEQ ID NO: 8856 - DNA, 471 bp, Staphylococcus epidermidis
atgacgatagaaaaaaagaaaaataagattatttttaatagaacttttagtgcaccaattaataaggtatttgatgcttatacaaagcgagaactatttgaacaatggtttcatcctcaagacgcatctgtcacagtttatgattttaatgctacgaaaggaggaagcgctttttatgctattcaagctcctcagatgataagttatactattgctgaatatctgcaagtggatgcaccatattatatagagtatttagactattttgctacgtcaaaaggggaaaaagacacaagtatgcctggtatgcatatcactttgaattttgaagaagtaaaaggaaagactactgtaacatcgacatcgacttttccaactgaaagtgccgctcagcaagcgatagacatgggtgtagaaacaggtatgaattcaacacttaatcagttagagaaattactaaatcaaaagtga

SEQ ID NO: 8857 - DNA, 597 bp, Staphylococcus epidermidis; identical to SEQ ID NO: 6109

SEQ ID NO: 8858 - DNA, 363 bp, Staphylococcus epidermidis; identical to SEQ ID NO: 6108

SEQ ID NO: 8859 - DNA, 1248 bp, Staphylococcus epidermidis
atgaaatttgtaaatttaacttctgaagaattcgagcaatttacttcagaaaatttctcgcattatacacaatccagtatacattataataatagatcgaaaacaaaaggtgacgtacatttagtgggagttaaagatgatcaagaagatgtcattgctgcgtgcttattaacagaggcacgttctttaaaattctttaagtatttttacacacatagaggaccagtcatggactttaacaatttagttttagttcgcttcttttttaaatcacttactgcttatttaaaaaaacacaattgtttatatgtactcgttgacccttatgtattagaaaatttacgtcaacctaatggagaaatcattgaatcctttgataatcgcgcattgattaaaacaatggaagaattaggttacaaacaccaaggatacactgtaggttatgatacaatgagtcaaatccgctggttatcagtacttaaccttaaagataaatctgaagatcaattattaaaagaaatggattaccaaacacgtcgaaatattaaaaagacttatgaaatgggtgttaaagttaaaacattacccattgaagaaacaaatacattttttgaattattcaaaatggctgaagaaaaacatggctttaaattccgtgaagagccttactttgttgagatgcaaaaaacttatgaagatcatgctatgttaaaacttgcttacatcgatttacaagattatttagatacgttgcaaactaaacatcaaaaccttaatcaacaactaaaagatgttgaaaaaacattagaagaaaatccaaattctaagaaaaataaaacgaaacatacacaagtcaaacaacaattcgatagtaatgcgcgtaaaatcagacaaactaaagagaaaatagcagaagaaggtcaagttcttcatcttgctgcagcattatatatatataatgatcacgaagtgtattacttatcaagtggctctaaccctaaatataatgcttatatgggagcatatcgattacaatgggatatgattcaatttgcaaaagaacataatatcgatagatataatttctacggtgttaccggagactttagtgaaaatgctgaagatgctggcgttcaaaaatttaaagaaggatttaacgctaaaatttatgaatatattggtgattttatcaaaccaattaaaccactattttataaagtaaaacaagaattagaaagtcgtagataa

SEQ ID NO: 8860 - DNA, 147 bp, Staphylococcus epidermidis; identical to SEQ ID NO: 2664

SEQ ID NO: 8861 - DNA, 732 bp, Staphylococcus epidermidis; identical to SEQ ID NO: 2663

SEQ ID NO: 8862 - DNA, 720 bp, Staphylococcus epidermidis; identical to SEQ ID NO: 2662

SEQ ID NO: 8863 - DNA, 789 bp, Staphylococcus epidermidis
atgaaaagacttttactttgcattgttgcacttgtttttgttttagcagcctgtggcaacaattcatctaacaataaagataatcaatcaagcagtaaagacaaggatacgttaagagttggtacggaaggtacatatgcgccctttacttaccataataaaaatgatcaattaacaggttatgatattgatgtgattaaagcagttgcaaaagaagaaaatcttaaacttaagtttaatgaaacgtcatgggattcaatgtttgcaggattagatgctggtcgttttgatgttattgcaaatcaagtgggtgtgaataaagatagagagaaaaaatataaattctctgaaccttacacatattcaagtgctgtacttgttgttcgtgaaaatgaaaaagatattacatcattcaatgatgtaaaaggtaaaaagttagcacaaacgtttacgtctaattatggtcaattggctaaagataagggtgcggacgttactaaggtagatggatttaatcaatcaatggacttactattatctaaacgtgtagatggtacatttaacgacagtttatcttacttagattacagaaaacaaaagcctaatgctaaaattaaagcaatcaaaggaaatgcagagcaaaataaatcagcatttgcattctctaagaaggttgatgaaaaaacgattgagaaatttaataaaggcctagaaaaaattagagataatggtgaattagctaaaattggtaagaaatggtttggtcaagatgtttctaaacctgaataa

SEQ ID NO: 8864 - DNA, 687 bp, Staphylococcus epidermidis; identical to SEQ ID NO: 2660

SEQ ID NO: 8865 - DNA, 882 bp, Staphylococcus epidermidis
gtgactcaaaatgaaaatttgaagttagcgcaacgaggtgcatttcttagtttagtcatctatattatactttctattgcgaaatatatgactggatatgtttatgattcggcggcagttagagcggatgctttaaataacatgacagacattttagtttcagtagcagttattgtcggacttaaaatctctattaaacctgctgatcaaaaccacccatatgggcacttaaaatctgaaaatatttccacattgctagtatcattcattatcatgtttgtgggaatacaagttattatagaaaactttccgagattgtttacacatgattcacatattcctaactttattactattattataagtatgatcagtggacttgtgatgttatgtgtctttgctattaattatcgattatctaaaagaacgaaaagtagctcattaaaatcagcagctaaagataatttatctgatagtttagtcagtattggcactgccattggtctaatgttcacacaaattggatttccaattatcgatattatattggcaaatattttaggtttattaatcgtgtatacaggttttggaatttttaaagagtcgatttttactctaagtgatggtttcaatgaacaagatttagaagaatacagattagacatattagaagttgaagatgtaattgatgttaataatattaaaggtagatatcatggaagtagtatctttattgatgtgaccattgtagtagatccttatctttcactttatgaagcacatcagatttgtgataaagttgaaattcatttgcataataaaggaatttcgtctgtatatgtacatccagaaccctatactacaaaagacgaagtaaaataa

SEQ ID NO: 8866 - DNA, 279 bp, Staphylococcus epidermidis
gtgaattatatggttagtcacattgctggatttattgtaagttttattatttcatattatttaaattgttattttgtatataaagtaaaacctacaatagaaaagtttttaagatttcctatcactcagatagttaatatgggaatgcaaacgttattattatatatattcgtaaagtggttgaatatcgcttcggaaattgcaccttttgcgggtctaatcattacaatcccagtgacattcatactttctaagtggttacttagagataaagtttaa

SEQ ID NO: 8867 - DNA, 1473 bp, Staphylococcus epidermidis
atgaattacttaaaacaatatgaatcatttttttggttaataggaatttttatcttttatcttataatggcaattctaacaccattatcaactacggattggcatgcatataaagttaatctaagtcaatatttgactcaagaaaatggtcgttatttaggacatttatttgaatgggttgccgtacataatatcataataagagctttaatatatgcgataacttcgtttttagttatctatttagttgcttatatggttcaattacatacgaatcgtttttattttattttgagttttgtgttaatggttactgtacctaatacaatttatagcgaaacttacgggtggtttactggattttttagttatatacctgctacagtcctatcactttttattctttttactgtagttaaaatgattgagtcgcacgatacagtttctgaaatgcaattatgggtatttttattagtaagtttgtttggacaattcttcttggagaatctttccatcgctaatagcttaattattttaataggaatggtagtctatttctttgttaaaaaaagactcagttatttcttaattgtaggatttatgcttagttgtataggtaacattataatgtttttaaacttcaattattttttaattaaggatggattaaatacgcattattcaatttccgatagtcatggaatgatacataaagcaggtgtgacgttatttaagcttgtaccagaatatatgtttattaatcaaatgattattcttaccgtgatatcaatagtaagtatagttttacttaagcaaaataaaagcctgaagcatatgagagtttatattaaaataccactactcttaggtttaattactttacctgtttataagatcttcgtttacaatcaatttcattttgaattatataaagcttcattttctatagccgttttgaatacaacgatttgcttcatttacatgataagtgtgatatacgttgtgtttaaaatgatacagcaaagatacataagaatgattgtgatggggagttttatagctatggcttcatctgttttgccacttttatttgtgacgcctataagttatagaaatttttattttatttatactttatggatcgtgatattactttgtttaattcagcaatgtgatgtgctatttaaacaacttgaacatataattaaaatatttgcgattatcatcagcatcattatgatgattggatttacttttatacatattagtagtgtgcacagaatagacttcattaaagaacaaataacacaacatcatcgccatcagaaaataacattggaaagattaccatttgagcgatatactcatatgactacaccaaagtcgaaggaacaacttcaagatttcaaacactattatgatttgcccaaagacatcacatttaaagtagtcccatatggtacaaaacaataa

SEQ ID NO: 8868 - DNA, 1152 bp, Staphylococcus epidermidis
atgtcaccatataaagttatcattgcacctgattcttttaaagaaagtatgtcggcaaaggaagctgctttagctattaaagatggattccaagaggtgttcgattccagtactatatatgacattattcctatggctgatggtggcgagggaacaaccgaagtattgaaagaagccttaaatgctacctcttattgcgtagaagtaaaagatccacttaatagaaatatcatggctagttatgagagaagcaacgaacaccaaacagctatcattgaaatggcagctgcttcaggactagcattattgagtaaagatgaaagagatccatctattacaacttcgtacggtaccggccaactcattaatgatgcacttaatcacgatgttaataaaattattttaggaataggtggaagtgccacgaatgatggtggtgtaggaatgttaaaggctttaggtgtctcttttaaagataaaaacaatcaagagattcgcgatggaggtttagccctatctcaaatagaatacattgatattactcgtataaacccacgattgaaagatgtgaatattaaagtagcctgtgatgtaactaatccattattaggagacaatggagcaactatagtttatggtccacaaaaaggcgctcagcaaaagatgataccaaagttggattccgcattacgtcactatcatgataaaattgaaagagaattaaatatgaatgtaaaagatatcccgggcgctggtgctgcaggaggcatgggaacagcgttaattgcgtttctaaacgctgaattacgtcctggaattgatgtagttcttgaagagactcaatttaaacaaagaataaaagatgcgaatttagttgttactggcgaaggtaaaatggataaacaaacaatctatggcaaaacacccattggcatagctaaagttgcaaaatcatatgatatacccgtcattgctatttgtggtagtttaggaaaagattacgaagcaatttatcaccacggtatcgatagcgtgtttagtatcatggaacgtccatgccaccttgacgaagctttgaaagaaggcgcacttcatgttaaacatacaacaacaaatatcgcacgacttttacaagtaaaaattgaaaactga

SEQ ID NO: 8869 - DNA, 702 bp, Staphylococcus epidermidis
atgaaaagaacagataaatatagagattcatacaaatatgatgaccaatatcaaaatcatcgtaaacgttcagaagaagatatgtatcgacaacatcaagagtcccaacagagagcaaattcaaatcgtgcaacacaaagtgaaaatgatagagagtatgaaaatcatcctgaacgttattacaatggaagagactatcgacgtgagcagcaattggaagaagaaaatgaaaaatcaagcaaaactaaaaaatggctgattgcaatcatagttattttactcattattgtagctatctttatcacgcgtgcaattatcaatcataataatgataaagtaagtaatgaccctaacgtttcacaaaactataaaaaggaagttgaaaatcaaaacgacgacattaatcgacaagttgattcagccaaaagcgatataaaaaataaaaaggacacccaatcccaaattgataaactacaaaatcaaattgatcaattaaaacaaaatgaagaaactaatgcggattctaaattcacaaaattttatcaaaaccaaatcgacaaactgaaaaatgcaaataacgctcaacttaataacgaaaatcaaagtaaagttaacaacatgcttgaagacatcaatacaaaatttgatagtattaaagctaaactagaaaatatcttgaatggatcaaattcaggaaactaa

SEQ ID NO: 8870 - DNA, 1200 bp, Staphylococcus epidermidis
atgatgactacaagttccaaacacttatctaaaatattaatcgttatacttggcgttatgactgcatttggtcctttgactattgatatgtacggaccatctttacctaaagttcagcatgcgtttggttcatcaatttcagaaatacaacttacattatcctttgctatgataggtttagctattggtcaatttgtgttcgggccactatcagatgtattaggtcgtaaaaaaatggcactcattttattgattggatatttaatagcctcattattatcagtttttacagttcatttaacaatatttttaattatccgtttaattcaaggtttagcaggaggtggtgcaatcgtcatagccaaagcttctattggagataactatgacggagacgaattagcaaaatttttaacttctcttatggtcataaacggtataatcaccatcattgctccactgttaggtggcctcgctttatctattgcaagttggagaatgatttttatatttttaacaatcattaccttaatagtcatcttaggcatcttattaaagatgccagttgggctccatcaagaacaatctcagttaaattttaaagcaatatttaaagattttggtctgttattaacaaaacccaccttcgttattccgatgttattgcaaggattaacttatgtcatgttattcagttattcgtcagccgcaccttttatttcacaaaagatgtatcatatgacaccacttcaatacagtgcaatgtttgctattaatggagtgggtttgatagtcgtcagtcagataaccgctattatagtagaaaaggtaagccgatatgcgatgctcatatatttaacaatcattcaaatgtcaggtgttgtaattttaatatttactttaacattacatcttccattgtatgttttacttattggcttttttattaatatatgtccagtcacttctatagcaccactttgtttttctatggcaatggctgaacgcacaggtggaagtggcaatgcttcaagtttacttggcctattccaatttattttaggaggcctcatttctcccctagttggtttgaacggtcagcatgatatgtccccgtatctaattattattagtgctacagctgttttacttattgcactacaaattatttatttcaaattatttatgaaaaacacatag

SEQ ID NO: 8871 - DNA, 525 bp, Staphylococcus epidermidis; identical to SEQ ID NO: 2653

SEQ ID NO: 8872 - DNA, 810 bp, Staphylococcus epidermidis
atgaaaataggtactatttctgacctacacattgaccgtcatccacacttaaatcctgaaatatatttagaaaagctttgtcaggtgattaaacaaaggtctattgagttacttatcatagcaggggatatatctaatgactataggataagttacgattttattcaaagcattcaagaattaagcgggatacctacttattttgttccgggaaaccatgatttatggtctgaccaagcagataaaacttcaacagaaatactatcattctttcgctcaaaagaggaatgcttgatcggcaatccaatcattattaatgatcaatatgcaattgtaggccatgtcggttggtatgattatagctatgcagatcatcgtttttctcagcaaaaaatagcaagtggtaaacattatggtgcaacttggcaagataaagtgagaacagattggtcattatcagacccgaaactatcccttttagctgctcaagaggtggaaaaagacattaacaatgtaagcccacgtcaaattattttagttacgcacgttgtaacacatcctcaattcgtagtaccaacgcctcatcgtatttttgacttttttaatgcatttattggtactcatgattttgatactatttatagaaattatcctattcgatttagtataatggggcatgttcattttagaaaaaaacttgttgaaaataacatattatatatatgtccgtgtttaggatatcaaagacaatggatgacagatgatatagcatatgaaataaatcatgctttagtcgattttgatatttag

SEQ ID NO: 8873 - DNA, 1377 bp, Staphylococcus epidermidis
atggcaaaacaactacaaagagagttgaataataggcatattcaattaattgctataggtggcgctataggtactggtttatttttaggttcaggacaaacaatttctctaaccggaccttcattactctttacttacatgttgataggtatagtgttatttgcttttatgagagctcttggtgaattattattaagtaactctaaatttaattcattcgtagatattgcaaatgaataccttggtccatttggtggatttgtaattgggtggacctattgggtttgttggattgtctctagcatgtcggacctcactgcgatgggacaatattttgcttattggtatccacaagtcccacactggttgacagtactatttattgtactcctacttatatcatttaatttgcttggcgccagattatttggagaacttgaattttggttttctataattaaagtcgttacaattattacgatggttattgtaggtttagttctgatttttttatcatttaaaacagaatatggacatgcttcttttggtaatttgatacatcatggcgggatgtttccacatggtgcagctggatttttaatgtccttccaaattgctgtatattcatttatcggtatagaacttataggagtcacagctggcgaaacaaaaaatccagaaaaaacaattcctaaagcaataaataacgttcctatacgaattttattattttatataggtggtttacttgtaatcatgtctgtcattccatggtttaaagttgatcctgatagtagtccgtttgttaaattattcacactaattggtgttccctttgctgctggcatagttaattttgttgttttaacagcagcagcatctgcaacaaatagcggaatatattctaatagtagaattttatttggtttagcgaaacaaggtttaggtcctaaagtattgacaaaaactaattctaatggtgtaccttatctctcaatgttagtatcttcaataacattgttaatcgcagctttattaaattttattttcccagatgctattaaattatttatttatgtaacgacactatctaccgtcctattccttgtagtgtggggaatgattatcgtttcttacatcgcatacgtaaagaagaatcctgaacaacatcaatcaagtgcatttaaattatggggcggaaaaattattgcctatattgtgttatcttttttcatatttatctttattttgctattctttagcaaagatactagagtagctatttttatttcaccattatggtttatcttcttgttcttttattataagaaatacaagaataatgctgaatctttagccgatagacagcgacattaa

SEQ ID NO: 8874 - DNA, 1830 bp, Staphylococcus epidermidis
atgttcattcaatttaaaagacttttgattggtagtcctaaaagaaacagagacttaaaaaacgagaaaatttcaaaatttaaaggattagctatcctatcatccgatgcattgtcatcagttgcatatggtcctgagcagatattaattacattatcggtgataggagctgtggcatcttggtatacgctgcctattgccggagcagttttaatattattaacagctctaattttatcttatagacaaattatttatgcttatccaaaaggtgggggagcgtatattgtttctaaaacaaatcttggtgagaaatggggattgctagctggagggtctttattagtcgactatatattaacggtggcagtgagtatttcttcaggagcagatgcttttgttgctgcatttccccacttatatcattttaaagtgcttattgcatgtttattagtactctttattttaatgatgaatttaagaggtttgactgaatcagcaactgtattatcatatccagtctacttatttattataggtttaattgttttgatagtcgttgggacatttcgcgtagctactggacaaatcgcaccacatattcattccactgtaggtagtactgtgcccggtgttacgttatttttacttttaaaagcattttcatctggagcatcatcacttacaggtgtagaggcaatatccaatgcagtaacaaattttaaaaatccagcacctaagaatgcagtcaaaactttagtcactatgggtacaattttagcagtgttattagtaggtattgttgtactctcatatatatatggaattatgcctcaaactgaaacgaccgtgctttcacaacttgcgtcccaaatatttggtgaaaatgtagcgttttattttatacaagctactacagttatgattttggtattggctgctaatactggttttacagcatttcctatgctagctgcatcaatgtctaaagacaaatatatgccacgtatgtttactgttcgtggtgatcgtctcggttattcaaactcgattattatattaggtgtattagccatcattttaattatcctatttgaaggaatgacagagaacctcattccattatatgcagtaggtgtttttattccatttacgcttgctcagtttggtatggttttaaaatggcttcgggaacgtcctgaacgatggggaataaagcttactatcaatttaattggtggtacgattacgtttatcgtattcatgattttactcattactaaacttaatcaagtatggccaattcttttatttttaccttttattgtatttatttttattagaattcatgtacattatgagaatatagcatgtgaattacgatctgaaattgatatacacgatattcctgttgtagatcgcaatttagctattgtacctattcaaagtattacaactgtagttgataaatctatttattatgccaaattattagctaatgatgatgttattgcagtgcatgtgacatttggtgatgaagatgagcaggcttttatgactaaatggaaaaaacattttcctgatgtaagacttgtgattttacattcagagtatagaagtattattcatccgatttcacgatttatagataaaattcgtaaaaaagcgaatgataaaaattatttaattacagtagtcgttccagaatttatccctaaaaaggcttggcagcacttattgcacaatcaaacgagtttacgtttaaaattgcatttaatttatcaaaaaaacgttactctgtgtactattccattcaaattaataaaataa

SEQ ID NO: 8875 - DNA, 1518 bp, Staphylococcus epidermidis; identical to SEQ ID NO: 2649

SEQ ID NO: 8876 - DNA, 837 bp, Staphylococcus epidermidis; identical to SEQ ID NO: 2648

SEQ ID NO: 8877 - DNA, 933 bp, Staphylococcus epidermidis; identical to SEQ ID NO: 2647

SEQ ID NO: 8878 - DNA, 1401 bp, Staphylococcus epidermidis
atgaatacatcacaaaagtttaggggagataatcgcttattattagggattattttaggggttattacattttggttatttgcacaatcacttgtaaatctagtcgtgccattacaatcatcatacaatagtgatattggtactattaatatagcagttagcttatcggcactattttctggtctgtttattgtaggtgcaggagatattgcagataaaattggtagagtaaaagtgacatacataggcttagcacttaatattgttgggtcggttttaatcattattacgccattaccaagtctattgattattggacgtgctattcaaggattgtcagcggcatgtataatgccagcgacactcgcaatcattaatgaatattatatcgggacagcacgacaacgtgcattaagctactggtccatcggttcatggggaggtagtggtgtttgtactttgtttggtggtttaatggcaactaaccttggatggcgctcaatctttattgtttcaattattctgacaatattatccatgtttctcattaaacatacacccgaaacaaaagcagagcctataggagatcaaccgacagagacaaagaaatttgatgttgttggtttaatcatcttagtggttagtatgttaagtattaatgtgataataactcaaacctctcaatttggtttgttctcaccatttattttggaacttattgcaatttttgttatatcgttaattatattcgtgatttacgaaaataaaatcaaacaaccacttgtcgattttgatatctttaaaaacaaaggttatacaggtgcaacgatttcaaactttatgttgaatggtgtagctggtggtacattgattgtagtaaatactttttatcagcaaaaattagattttaactctcaggaaacaggatatatttcacttacatacctaattgcagtattaattatgatacgtgtgggtgaaatgatattacaatcgttaggacctaaaagacctttgttactcggaagtgccttgaccgtcataggattaatattattatctttgacgtttttacctaatgcttggtatatagcgtcaagtgtcattggttatttattatttggtaccggtttaggtgtttatgcaacaccatccacggatacagctgttgcacaagcaccagatgataaagtaggcgtcgcatccggtgtatataagatggcatcatccttaggaaatgcatttggtgtggccatctcaagtacagtttacagcgtacttgcagcccaacttaatctgactttaggtggttttactggagtaatgtttaatgcgcttatagcattattagcattcctttctattttgttcttaataccgaaaaaacagtctaatgtataa

SEQ ID NO: 8879 - DNA, 1776 bp, Staphylococcus epidermidis
atgcttaatttatttattttattacttgaacgcgtgggattaattattttactcgcatatatactcatgaatattaatcattttaaaacaatgatgagcgaacgtgacaaatggcgttcaaaattccaactaatcattatttttggtatattctctatgatttcaaattttacaggaattgaaatagaaaatggccatatcgtatctggtgatatttattaccacttaagcaaagacgcctcaatggccaatacccgtgtattaacaatcggtgtttctggtctaataggtggaccgtgggtagctataattgtaggcattatttcaggattatgtcgtttatatattggcggggctgacgcatatacctatcttatttcatccatagttatcgctatcatatctggttactttggtcatcaaacaataaaacaaaatacatatccgtccattaaaaaaggtgctattatcggtgcaataactgaaattattcaaatgggctgtatattattatttacaaataacttacatcacgcaattacattagtcagttttatagcactaccgatgattatcattaatagtttaggtacagccatatttttaaccatcattttgtcgaccatcaagcaagaagaacaaatgcgtgcagtccagacgcatgatgtattacaactcgctaacgaaacactaccttactttcgatctggacttaatgaaaaatcagcccaacaagctgctgaaattattttaaaattaatgcaagtgtcggcggtcgctattacaaataaaaaagatattttaacacatattggtgcaggcagtgaccatcacgtagcacgtaaagagataattactgatttatctaaagaagtgattcaatctggaaaattaaaagtcgctcatacgagagaaggaattggatgtcaccatcctaattgccctcttgaaggagccattgtcgtccctctttatatacataatgaagtcgcagggactttaaaattttatttcacagataacaatattatttcaacttcagaccaacagctcgcaaaaggtctcgccaatatattttcctcacagctagaactaggtcaagctgaaatgcaaggacaattattgaaagacgctgaaattaaatcattacaagcacaagtcaatccacatttcttttttaatgctattaacactatatcagcactagtaagaattgatagcgaaaaagcacgacgtttactgattcaactcagtcagttcttccgctctaatcttaatggtgcacgtaataatacgattactttacaaaaggaattacaacaagtagcagcatatttatccttagagcaagcgcgctatccaaatagatttaacatacactatcgaattgatgatcagtgtcaagatgcgctcatcccaccttttataattcaaatattagtggaaaattctattaaacatgcatttaaaaatcgtaaaaagaataatcatattgatgtggatgttagcatgaagcaagactacttaagtatatctgttcaagataatggtcaaggcataccagctgatcaattagatactattggatatacgacagtaacgtctaccactggtactggtaatgccttagtcaatcttaataaaagacttactggactatttggaacaacatcggcactgaacattcaatcttctcaatcaggcacgactgtaagttgtttaattccatataaatcttctaaggaggaacactttaatgaaagcgttaatcgttga

SEQ ID NO: 8880 - DNA, 759 bp, Staphylococcus epidermidis
atgaaagcgttaatcgttgatgatgaaccacttgcaagaaatgaattacaatatcttttaaatcttaatgatgctatagatgaaattgaagaagcagaaaacatagaagaaacattggagaagttactctacaacacatttgacttaatattcttagatataaatttaatggatgaaagtggtattgatttagctcaaaaaattaataaaatgaagcgatcaccacatattatctttgcaaccgctcacgagaaatttgcagtcaaagcctttgaattaaatgcaaccgattatatattaaaaccttttgaaaaagaacgtattaatcaagctgtaaataaagttgacatggctaaagataaaccaaaaaacaaagataaaactatcacacctaaatatattgattatagtgatgatgagcgcgctcaaacacatgtacttccaattgaagtggatgaacgtattcacatcttaaatttcacagacattatcgcattatctgttaataatgggattacaacgatagatacaacaaaacaaagttatgaaacgaccgaaacacttaatcattacgagaaaaaactaccttcctctctatttattaaaatacatcgcgctactatcgttaataaagaacatatccaaacaatagagcattggtttaattatacgtatcagctgacgttaacacatgaatttaaatatcaagttagtcgttcttatatgaagacttttaaacaacaactcggtcttcaataa

SEQ ID NO: 8881 - DNA, 450 bp, Staphylococcus epidermidis
ttggaacaaacgcatctcgttaaaaacaaaacggttgataacaagaagtcaatgaaatacagtatttttcaacaagcattaacgattgcagtgattttacttatatcaaaaattattgaatcatttatgcctattccaatgccagcttcagtaattggacttgtactattatttatcgcattgtgtacaggcattgtgaaattaggtcaagttgagactgtgggaactgcattaaccaataatattggattcctattcgtaccagctggtatttcagtcattaactctttaccaatccttaagcaaagccctattttaattattttacttattattatttcaacacttttattattaatttgtactggctttgcgtcacaattattagtgacgaaatcacttttcccttctaaagagaaaaatgaagaaacaagtcacgtaggagggtaa

SEQ ID NO: 8882 - DNA, 702 bp, Staphylococcus epidermidis
atgattgaacatttaggaattaatacaccttattttgggatattagtatcattaataccatttgtcatagcgacttatttttataaaaaaacgaatggtttctttttactagcacctttattcgtaagtatggttgcaggtattgcttttttgaaattgacaggaattagttatgagaattataaaatcggtggcgacattattaatttcttcctagaaccagctacaatatgctttgcgattcctttatatcgcaagcgcgaagtattaaaaaaatattggttacaaatatttggtggtatagctgttggtacaattattgccttgttattaatttatcttgttgcaataacattccaatttggcaatcaaattatagcatctatgctacctcaagctgcaacgacagcaattgcattacctgtatctgacggtatcggtggtgtcaaagaattaacctcactcgcagttattttaaatgcagttgtcatttctgctttaggtgctaaaatagttaaattatttaaaatatctaaccctattgccagaggacttgcactagggacaagtggacacactttaggtgtcgcggcagctaaagaattgggtgagactgaagaatcaatgggaagtattgcagttgtcatcgttggcgttattgttgtagcagtagttcctatacttgctccaatcttattataa

SEQ ID NO: 8883 - DNA, 696 bp, Staphylococcus epidermidis
atgaaaggtaatttgttacattcaatcatcgaatattactcactgaactgggcctttcttctagaactgttcttcaaacatctattaatgtcggtatatggtgtgttgtttgcatgtataattggaattcctattggtattttcatagccaagtataaacgtttatcgtggccggtaattacaattgcaaatattatacaaactgttccagcaatcgctatgttagccatacttatgttggctatgggattaggaccaacaactgttgttgtaactgtattcctatattcgttattacctattattaaaaatacttatactggtattgtagaagttgatgaaaatattaaagacgctggtaaaggtatgggaatgacggggaatcaaatattaagaatgatagagttaccattatctttatctgttattattggtggtgttagaattgcacttgttgttgctatcggaatagtagcgattgggtcatttatcggtgctccaacactaggtgatattattattcgtggtacaaattcaacagatggaacaacattcatcttagcaggtgccataccaattgctttaatagcaattatcatagatataggattacgttatctagaaaaacgtttagatcctactcgtaaaaacaaaaaagattcaatgcaaaaacatcaagtacaaaaattacattaa

SEQ ID NO: 8884 - DNA, 945 bp, Staphylococcus epidermidis
ttgaagaagtatcttaactatacactgattctgattgcattatctctcatcgtgttatctggatgcagtttaccaggcttaggtgatggaaatgctaaagatgatgtgaaaattacaacgactgaaacaagtgaaactaagattataggtcatatggaaaaattattaattgaacatgaaactgatggaaaaatcaaaccgacgttaattggtaacctagggtctagcattattcaacataatgcgttacaacgtggagatgcaaatatgtcagcggtacgttacacaggtactgaattgacgagtgtattagcagctaaacctactaaagatcctgataaggccatgtctgaaacacaacgcttatttaaaaagaaatatgatgaaaagtattatcattcacttgggtttgcgaatacatacgcattcatggtgacaaaagaaacggctaaaaagtatcacttaaaaaaagtatcagacttagagaaatataaagatgaactacgtcttggaatggatacccaatggatgaaccgtgcaggtgatggatatcctgcttttgttaaagattatggatttaaatttgatagtgcgcgtccaatgcaaattggtttagtatatgatgcattaaaaaataataaattagatgtagcagttgggtattcaacagatggacgtattgcagcttatgatttgaaaatattggaagatgatcgcaaattcttcccgccttatgacggtagtccacttgcaaatgaacaattaataaaggataatccagaaatcgataaggcactaaaaaaattagaaggtaaaatctcaacagaagaaatgcagaagttaaattatgaagcggatggaaaaggtaaggaacctgcagtgatagctgaagaatatttaaagaaacatcattactttgaagaaaagaaaggtggtcataagtaa

SEQ ID NO: 8885 - DNA, 636 bp, Staphylococcus epidermidis; identical to SEQ ID NO: 5808

SEQ ID NO: 8886 - DNA, 1257 bp, Staphylococcus epidermidis; identical to SEQ ID NO: 2638

SEQ ID NO: 8887 - DNA, 1053 bp, Staphylococcus epidermidis
atgaaagcagcagtatggtatggacaaaaggatgtacgcgttgaagatcgcgaacccaaagcaataaaagacaatgaagtgcaagttaaagtctcttgggccggtatctgtggtactgatttacatgaatatttggaaggacctatctttatttcaactgatcaaccggacccactacttggtcaaactgcacctgtgactttaggtcatgaattttcaggtgtcgtagaaaatgttggtaaagacgtatcacgttttaaaaaaggggatcgtgtggtagttaatccaacagtgtctaaaagagaaaagccggaaaatgttgacttgtatgatggttattcatttataggactaggttctgatggtgcatttgccgagtttactaatgctcctgaaacaaatgtttatcatctaccagataatgtttcagcacgagaaggtgctcttgtagaaccaacagccgttgctgtccaagcagttaaagaaggcgaattattattcggtgatactgtagcagtatttggcgctgggccaattggtttgttaactattgttgcagcaaaagctgctggtgcaagtaaaatatttgtctttgacttatcagaagaacgtttagcgaaagctaaaagtgtcggtgcgactcacgtgtataactcaggtaacgtcgatccagtacaaacggtttatgaacatactgacaacggtgtagatgtgtcatttgaagttgctggtgtaggtattactttacaacaatctattgaagtaacacgtccacgtggtactgctgtcatcgtatcaatcttcggtcatcccgtagaattcaatccattattacaaatgaataaaggtgtcaagttaacaactacaattgcttatacaccaactacattccaacaaacaatagatttaatcgctaacggtagcttaaatgttaaagacgtcgtaacagatcaaattgaattagataatattgttgaaagtggcttcaatcaacttgtaaacgataaatctcaagctaaaattttagtccgtttaaatggtgaccaaaaataa

SEQ ID NO: 8888 - DNA, 210 bp, Staphylococcus epidermidis
ttgagaaatttaatttttaatgaaactgaacttgaagaaaattataaatggatgcatccttgttatacgataaacaataaaaatgctgtgctaatacatggatttaaaggttatgtagcgttgctttttcaaaaaggagcaatacttgaagaaaagtatcatacattgattcaacaaactgaaagactacaggctgaagctgtcccctaa

SEQ ID NO: 8889 - DNA, 1680 bp, Staphylococcus epidermidis
atgaaaaataatagcaaatcaaaaagtaataagataagtctttctcaactcgtcctccttggtcttggttcactaataggatcaggttggttatttggagcgtgggaggcatcttcaatggccggtccagccgccattatttcctgggttatcggtttcttagtaattggaacgattgcctataactatattgaaataggaactatgttccctcaatcaggcggtatgagcaactatgcacagtatactcacggctcattacttggttttattgcagcatgggcgaactgggtatcattagtaacaattattcccattgaagctgtgtctgctgttcaatatatgagttcttggccttgggattgggctaaaccaatgggatctttaatgaaagatagctcaatcagtacttacggtttgattgctgtttacatcattattgcaatcttttcattattaaactattggtcagtaaagttattaacatcatttacaagtttaatttctgtattcaaattaggtgtccctattttaaccataattatgttattagtttccggttttgatacaggtaattatggacactctatcggtacatttatgccttacggaagtgcacctatttttgctgcaacaacaacatctggaattatcttctcatttaatgcattccagacaattattaacatgggatcagagattaaaaatccagagaaaaacatcgcacgtgggattgttatctcacttacattaagtgctatattatatatagttttacaaagtacgttcattacatctatgccaagctcaatgttgcacgagcatggatggagcggtatcaatttcaattctccatttgcagatatggcaattttattaggtcttaactggttagcaatattactttatatggaagcagttgtgtcaccgtttggtactggggtttcttttgttgccgttactggacgtgtgttacgcgctatggaagaaaatgggcatattcctaaattcttaggtaaaattaataaaaagtataatatcccacgtgttgccattgcatttaatgcaattatcagcatggttatggtgacattgttccgtgactggggtacactagctgcggttatttctactgcaacattagttgcatatttaactggtccaactacggttatttcattacgtaaaatggcaccaaaaatgactcgtccattcaaagctaatattttaaaatttatggcacctttatcctttgttttagcatcattagctatctattgggcaatgtggccaacaacagcagaagttattttaattattattttaggtttacctatttatttcttctatgaatataaaatgaattggaagaatactaaaaaacaaattggcggaagcttatggattattatctaccttattgttctcgcatttttatcatttattggaagtaaagagttcaaaggcttaaattggattcactatccatgggatttcttagtcattgtaatcgttgctttaatcttctatcaacttggtacaacaagttactttgaaagtatttatttcaaacgtgcaaacaagttgaataagaaaatgggcgataaattgcgtaaaacacgcaaaaaagcgcgtcataaagattggaaagaacgcgatcgacaagagcaaaatcaataa

SEQ ID NO: 8890 - DNA, 1356 bp, Staphylococcus epidermidis
atggttcaagtcaagataggtaactgtaccatcaatggcatacacaaaaagaatattgatgtattcttaggtatcccgtatgccaaatcgttcaataagatatctcgattccaacattcaaagcttatggaactaagcaaaccaatgattgatgcaactcatattcaatccatcccaccacaaccctacaattcacttgaagactttttttcgatgacagattcatcgtttaattcttttaaacaaaatgattattgcctgtttttaaatatttggaaaccatcatccaatcaaaatcatttacctgtagtgatttacttttatggtggtagttttcttcaaggacatggcacagctgaactatattgtcctgaacacatagtagaacaagaaaatataatagtagttacttttaattatcgcttaggtgcactcggctacctagattggtcttattttaatcaacatttgaactataataatgggatttctgatcaaattaacgttttaagatgggtacatcaatatatcgaacattttggcggtgatccaaataacgtgacactaatgggtcaatctgcaggtagtatgagtatcatgacattaatgcaaatgcccgaacttgatgattattatcataaagtgatgttactaagtggaacgttaactactgatacaccactcaatgcacatactaaagtacaacatttttcacaactcatgaggcattattttcctaataaaacacttaagacacttaacagtgatgacattttatatctaatggagtctcaaaaaatagagcgtggaagatctcgtggacttgatttgatttatcaacctattaaagatcatcatatgtcacgatccattaaaaaatttcccaaaccgacattcatgagttatacacacgatgaaggtgatatttatattgaagacgcaacacgcaccttaccttctgaacgttttattcacttgatgtctcaatatggtacacacgtcgaaaaaaatgatgccctcacaatgaaacaacaaagaaatgtaataacagagtattgttttgttcgtccgatttatctatttttaaatcaaatgaatagttgcgacacttggctagcacgttttgattggcaccaaccccatacctcctactttaaaagtgcatatcatatattggatttagtattttggtttggtcatctctctattttgactaaaaatcattattctgtaacccaacatgatatgaatttaagtcgtaacatgatatctgacttagcttattttgcccgaaaaggtaagatgccatggaaatgttatgaacctcaacatcaagcgttacatatctatagataa

SEQ ID NO: 8891 - DNA, 1179 bp, Staphylococcus epidermidis
atgactgtcgcacgcacaacaacatttatattaagtgttttcatcgtaggtatggttgagatgatggttgcaggtattatgaatttaatgagtcaagatcttcatgtttctgaagcggtggttgggcaactggtaacgttgtacgcgcttacctttgcgatatgtggtccgttattagtgaagttgactcatcggttttcttcgcgatcagtattattatggacgttaattgtctttatcttcgggaatggtatgattgccattgcgccacattttggaataatagttgtaggacgtattttatcttctgccgcagcttcactcattattgtgaaagttttagcactcacagcgatgctcacatcagcaaaaaacagaggtaaaatgattggtattgtttatacaggttttagtggagcgaatgtctttggtgttcccatcggtacagtgattggcgactgggtaggatggcgatttacatttttattcattattattgtaagtgtatttgttggtgttttaatgttaatatatctaccaaaagaagatgaattgtcacatccaaatcaaacacctcgttcatctagtattgaatcacaaactggctcaagcgtcataagacctcgtgaggtttttaaatatctgatgattacatttttagtgctggttgctaattctgtaacattcgtgtttattaatccattaattttatccaatggacatgaaatgtcttttgtgtctttagcactacttgttaatggtgtagcaggtgtgattggtacttcattaggcggtgttttatctgataagtttactagtaagcgttggttaataatttcgatttcaatatttataataatgatgataattcttaacttattattaccaggaacaggattattattagttggcttatttatgtggaatttaatgcagtggagtacaaatccagctattcaaagcggtattattgaacacgtcgaaggagatacaagccaagtgatgagttggaatatgtcgagtctcaatgccggtattggcgttggcggaatcgtaggtggactcgttatgacacatttatcagtggaatatgttacttatactagtgcattgataggtttaattagtcttatcattgtattcactttaaaaaatagacattatgctaaaaatttatga

SEQ ID NO: 8892 - DNA, 777 bp, Staphylococcus epidermidis
atgagtaatacagcactttgtctgacagcacttttattactaatccctatctttatttcttataaagaaggattgcatattatcaaagatttagttattgctacaattagagcaaccatacaactattgattttaggctttttattacattatattttcgaaattaatgaaaaatggttattagtgctatgtgtgttagtcattattatcaatgcatcttggaatacaataagtcgtgcttcacctgtcatgcatcatgttttttggatatcatttgtggctatatttgtgggaacagcgctaccattggcagcaactgttgctacaggtgcaattaaatttacagcgaatgaagtgattccaattggaggtatgttagctaataatggtttaatcgcgattaatctcgcttatcagaatttagaaaaagcatttgttcaagatgtttctgatattgaatccaaacttacgttagcagcgacacctaagctcgcatcaaaatcatctattagagaaagtatacgcttagcgattgttcctacaattgattctgtaaaaacatatggtctagtttcaattccaggtatgatgacaggattgattatcggaggcgttgacccacttcaagcaattaaatttcaattgcttgtcgtgtttattcatacaacagcgacgattatgtctgcactcattgcaacgtatatgagttacggtcaattctttaatgctcgtcatcaactcattgctagaacgcaacgcacaagacaaagtagttaa

SEQ ID NO: 8893 - DNA, 663 bp, Staphylococcus epidermidis; identical to SEQ ID NO: 5800

SEQ ID NO: 8894 - DNA, 180 bp, Staphylococcus epidermidis; identical to SEQ ID NO: 5799

SEQ ID NO: 8895 - DNA, 783 bp, Staphylococcus epidermidis
atggatattaaacaatcttcagagaaacaaggtcgaccgcatcatttatcagacagtaggacagttttaaaaagaaattttatattaataccaacttatattttattacaaagtatcataccaatcattgttgttttcggctcattaggcatcactgccatgataacacaacaggcaccaccacaatggttgtatcattgttcattgagtttaagttttgtgattgctcaaggtctaatattaattatcttttataaaatacatcaatctgtaataaatgatgtgatgaagcaacaatggataattgcaaagaataaaataattaaaattgtaatagttgcgattgtcgtatatttattattacttataattcgggtgattggaacatcattacctaatcatttaagttatcatctcactcaatccgaacaacgtacgctagggctatttaaatcaccatatgtgttgttagttacttttatatccatggtattcttacgtccaatggtagaacaaatcatttatagatatctcatcatccatgaattaggaaaagtatggaatagacaatttgtaattggtttgtctattgttattgaaacgatcgtacatgtttacgacatggcatcgatttttgaaatttttccatatatcgttattgcttcagcagctacaatactatatattaaatcgcgggataatttaattgtcgcttatatatttcaagtgattttgcaatgtatcctttttatagaaattttatgtaagtataccaacttttaa

SEQ ID NO: 8896 - DNA, 1578 bp, Staphylococcus epidermidis
atgtcagttttaactgtcatgcaattcatagtcaatattatcatcatgattgtgttattaacgattatgattcttgggggtatttggttatttaaagataaaggtcaaaatcaacacagtgtactaagaaattttcctgttttgggtcgaatccgttatatttctgaaaaaatcggtcccgaattaagacaatatttcttcgctaacgataatgaaggaaaacctttttcacgaagtgattataaaaacatcgttttagctggaaaatataaatcacgaatgaccagttttggtacagggaaagattacttagagggattttatattcaaaatacgatgttcccacttcaagcaactgaattacatatcgatcatactgaattcatttctacattcttatatcatattgagaatgagcgcctatttagtagagaagaatacagaaaaagcgctcaggttgatccgtttttcttaactgatgaacatgcagtagtattgggctctaaccttaagcatccctttaaaattaaacgcttagttggtcaatctgggatgagttatggcgctttaggtaaaaatgcaattactgcactgtcaatggggttagctaaagctggtacatggatgaatacaggtgaaggtggattatctgaatatcatttgaaaggtaatggtgacatcatctatcaaattggtccaggactctttggagtaagagatcatgatggcaattttaatagagacatgtttatcaatcttgccgaacacaataatgtacgcgcatttgaaattaagttagctcaaggtgctaaaacacgtggtgggcatatggaggggaacaaagtcacagaagagattgcacgcattagaaatgtgaaaccatatgaaactattaattcacctaatcgttttgattttattaaaaatccaacagatttactgaatttcgttaatcatttacaatcgataggtcaaaaacctgtcggcttcaaaattgttgtcagtaaagttgaagaaatagaggcgttagttaaaacaatgatagagatagacacctatccaagctttattactgttgatggtggtgaaggtggtacaggcgctaccttccaagagcttgaagatggtgttggtttaccgttatttacagcacttcctatcgtttcaagtatgttagaaaagtatggcataagaaacaaggttaaaatttttgcgtccggtaaattagtgactccagataaaatcgctattgcattaggattaggtgcggatctcgtcaatattgctagaggtatgatgataagtgtaggatgcatcatgagccaacaatgtcatttaaatacatgtccagttggagtagcaacaaccgatcctaaaaaggaaaagggacttattgttgatgaaaaacaataccgtgttacaaattatgttacaagtttgcatgaaggtttatttaacatcgctgcagctgtaggcgttcatagtccaacggagattacttccgaccatattatctatagacaattagatggcactacaacgtccattcaggattataaacttaaattaatttcttaa

SEQ ID NO: 8897 - DNA, 468 bp, Staphylococcus epidermidis
atgaaaaaagtcatatcgcttttagtagtattagttataagtgctgtatctctttcggcatgtgggaaagaacgcacaaaaacttatgaaggcgaagtcaacggaaagcaagtgattacatctttgacatacaaagatgatgaagttctcaaacaatctactatagcaacaattaaatatgatgatttaggcatcgataaagatgaagctaaacaaatgtttaaaaatgatgaacaagcattcaaagggatagacggggttacatataaagctgattttaaagatcgaaaagccatcgaacatatcgatattgattataaagatgcggatatagatcagcttaagaaaaatttaggtttcatatcatcagatgccaaaaaaggtgaccatgtgagtgtggatagggttgttaaacaactcaaacgtaatggtttaaaagataaaagtaaaatgaatgaagataattaa

SEQ ID NO: 8898 - DNA, 1077 bp, Staphylococcus epidermidis
atgccagaatctaaagcgttacttaaatctttaacagatgttaatggtatttctggacatgaaatgcaagttaaatctttaatgaaagattatttaacacctgtgagcgatgatatcgttgaagaccaattaggtggtatttttggtaaaaagaatgctactcatggaactaaatctttaatgatttctggccatttagatgaaattggctttatcgttacacaaattgatgaacaaggatacatttatttcacgccaattggtggatggtggaatcaagtcatgttatctcaaaaagtgacgattactactgaaagtggcaaagagatacgtggaattattggttctaaacctccacacgccctctcgtcggaagaacgcaaaaaaccagttgatattaaaaatatgtacatcgatattggtgtgcgtaataaagaagaagcgaaagaagcgggaatcgaattaggtaatatgattacaccttatagcgaatttgaatcattagcgaatgataaatacttaactgctaaagcttttgataatcgctatggatgtgcactcgctgttgaagtacttcaacaactaaaagatgaaaacatagacatcaatttatatgccggtgcaactgtacaagaagaagtaggtttacgtggtgctaaagttgcagcaaatttgattaaacctgatttagcaattgcggtggacgtcggggttgcatacgatgttccaggtatgacgagtgaaaaaaatgaaggtaagttgggcgatggtccattagcaatattgatggatgccactagtatcgctcacgatggtttgcgcaaacatattaaagacgttgctgagcatcataatattccagtacagtgggcaacaacacctggtggtggtacagatgcaggtagcattcatgtagccaatgaaggtatcccaacgattacaatcggcgtgccattaagatatatgcactctaatgtatctgtgctcaacattgatgattatacaaattcagtgcgcttaattactgagattgttcgctcattaaatgatgacagttatcaagcacttatgtggtaa

SEQ ID NO: 8899 - DNA, 189 bp, Staphylococcus epidermidis
atgttttctactggtaataaagctaaaaagactatatttggagctatgacttgttcaaaatgtggtaagacactcaataatgatgaaaatattaccatcaaaatcaatactaaagaattaaaaggttatactcacttatcaagttgggctgatgcacagtataaattgtgtgaaaactgctcagaataa

SEQ ID NO: 8900 - DNA, 819 bp, Staphylococcus epidermidis
atggaacgtttagaaaacaaaatcgcagtgattaccggtgcgagtactggtattggacaagcatcagccgtggcgttagcaatagaaggagcacatgtgttagcgcttgatatatcagatcaattagaagaaactgtgcagtctattaatgataatggtgggaaagcaactgcatatcgcgtagacatttcagatgataaacaagtcaaacaattctcagaaaaaatagcacaagaatttggacatgtagatgttatttttaataatgcgggtgtagataatggcgccggacgtattcatgagtatccagttgaagtgtttgataaaattatggctgttgatatgagaggaacgtttttagtaactaaatttttattacctttaatgatgaaacaaggtggttctattattaatacagcttcattctctggacaagctgccgatttataccgttcagggtataatgctgcaaagggcggtgtcattaatttcacaaaatctatcgctatagaatacggacgtgaaaatattcgtgctaatgccatagcacctggaacaatcgaaacaccacttgttgataatttagcaggtacatcagatgaagaagccggacaaacattccgagaaaatcaaaaatgggtaacaccattaggtcgactaggaacaccggatgaagtcgggaaacttgtagcatttttagcttccgatgatagttcatttataactggtgaaactattcgtatagatggtggcgttatggcttatacatggcctggagaaatgttaagtgatgaaagttggaaaaactctactaaataa

SEQ ID NO: 8901 - DNA, 1533 bp, Staphylococcus epidermidis
atggaagaaagaattggtttgatagacattggttccaacacgattcgacttgttatatttggctacaataaaaaaactgggctcaatgaaatactgaatataaaaacacctgcacgattaagtcaatatctcactaagtccaatgaaatgaatgatgaaggtattcatgttttaaaagagacattaagcagttttagaaaagttgcggataaatttaacgttgatgcattatatcccatcgcaacagctgctatccgtcaatcaaaaaatcgtgaagctatcattaaagaaattaaacaagatattcatatcgaaattcaaattgtacctgaagaagatgaagcattttacggttactatgcgattacacatactactgatattgaaaatggaatttctgtcgatatcgggggcggttctaccgaagttacccttttcaaagacaagcaacttaaagaggctcatagctttccattcggcgtggtatcacttaagcgtcagttttttggtgataaagcacacaatgacaaaacagccattaaaaatatggaacagtttttacgtgagcaatttagtcagttagactggctatccaaccaacatattgcgcttgtaggagtaggtggttctgcacgtaatgttgcacgcattcatcaatcagcacatgcataccctatcggtggcgttcataactataagatgacttcgaaagatattaacaatgtttatgatttaatccgtaaaagttctcgcgatgaacttacaaatttagacggtttaagccgcgatcgcgtcgatattattctgccagctatctccgtctttaaaacacttttcaaaaaaattgacgccacacaattcaccttctcaagaaaaggaattcgtgaaggatttattatgaaccacatcagcaaacgatatcctgatgagtttaataaaagtaacgtacgtaaagatgcattacgtcatttagcgaatgaatatcatattgaagaaacgagtgctaatcgtcgtgtaaaattagctcaatccttattgaatcaaattataagtgaacgatcacttaatatttcagcaatggaaaaagaattatttattgaaggttcctacatttattacctaggtagtttcattgattcagactcaagttcaccacatacgtattacttaatcgcaaattcaatgattaacggcttttcacataaagatcgtgtgaaattagctttgttagctagttttaaaaacaaatctttacttaaattttattgcaaagaaacacagtggtttagtaataaagaaatagatacaatacaagctttaggggggattattaaatttgcaaacaccttgaatatctcacatactagttttgtagaggaagttaaactaaaagcaaagaaagatgacaaatacgatttattagtttattacaaaggttcacctattgcagaagaataccaagcaaatcgtcagaaaaagcatattgaaaaaattttaaaaggtaaggtttctattatatttacaaaatcttaa

SEQ ID NO: 8902 - DNA, 2166 bp, Staphylococcus epidermidis
atgcaaactcgattgggagaaaaagatattaatttaccgcagtattacaacaatagggagttaagttggctagattttaactatagggtattacaagaatcatatgataaaaataatccgttgcttgaaaaacttaattttatttctatcttcagttcaaatttagatgaattctttatggttcgagtggctgggttaaaagaccaagtcaaaatgggatatgacaaacctgaaaataaagcacaaatgacgcctcaagaacaacttgatgctattaaaattaaaaatacagactatgtgaacactcaatatcaacgttataacgaattaattaaagaattagccaattacgatattgagatggtaaaacctgaagacttatcagatgcattgatagaaaaattagaacaagagttcaagttaagtgtcttgccgacactcactccgttaggtattgatgcgtatcatccatttccaaagttaaataataaaagtttaaatatttttgttgatatcgatacggaagatgccattaattcagctatcgttcaaattccttcattaattccacgctttttaactttaaatgagggtacaaaacaatacgttgtcatggtagaagatgtgattacgtatttcatcaattatttatttacaggatacgaagtactaaatacttttactttccgaatcacacgtaatgcagatttaaccattcatgaagatggcgctgaggacttgcttatagaaattgaacgtttcttaaaagaacgtaagagtggttcggctgtacgtttagaattagattgtcgcacttctgaaaaagagaatgtagaatggttaatcaatcaattagaaattgaagataatgatatttattatttagatggtccacttgatttaacattcttatttggattggttgatcatctatctcataagctcaaatatttaacgtatgagaaatatactcctcaaccacctagatcattaggcaacaagaatatctatcaattatcattagaaagagatatattcttccaccatccgtatgaatcatttgaaccaatagttgactttattcgacaagcagcagatgacccaaatacaatcgctatcaaacaaaccttgtatcgagtgagtaaggattcgccgattattaacagcttaaaagaagctgctgaaaacggcaagcaagtaacggtgctcgtagaattaaaagcacgctttgatgaagaaaataacgtacattgggcacgtatgctagaagatgctggctgtcacgttatttatggtatgacacatctaaaaacgcatagtaaaattgcgctagtcgttaaacgcatcaacaatgaacttacgtcatttgttcatttaggcacaggtaactataatgataaaactgctaaattatacacagatatgggtatcattacgacaaataaagatatcgctgaggatgcaattaacttctttaattacttgagtggttactcaacaaaaccagaatacaataaattgattgtagcaccatacgatattcgagacgtcttcattgatcgtatcgataaagagatacgtagtcatttacaacatggtaatggtaaaattatgatgaaaatgaactctttaaccgataaaacgattatcgaaaagctcttcgaagcatcccaagcaggcgttaaaatacaactcatcattcgtggtatatgttgtcttaaaccaggcattccaggtattagcgaaaatatagaggttgttagtatagtgggtcgtttgcttgaacattcacgtatttactacttccataataatagtgaggcgcatatttatttatcttcagctgacgttatgacacgtaatatgattaaacgtgtcgaaatattgttccctgttgaagataaatcaataggacaacgattagttaactatatgaatttacaattatctgacaaccaaaaaggtcgttaccaagatgcacaaggcctttatcattatgtcgaaaacaattcatctcctttaaactctcaatcttacttgatgcaagaagcaattaagtatggagaagaactaaaaaaacaatcggtacaaccttctggacaacctgttcattctagacgtggcggtagttggatgcgaaaattaaaaaacacatttaaaagataa

SEQ ID NO: 8903 - DNA, 1245 bp, Staphylococcus epidermidis
ttggataaacgtcaatttgaaattttagatatgctagtgagatttaatactgaaagtccacctggacgtaatacagatccattgcaagatgaaatcgaaacgttacttaaacaactggatttttcaatacagagagaacagttatatgacaatgatagtgtgatagtagccaccttaaaagggcacaatcctaaagcgccaaaactgatattgaatggacatgttgatgtagcttctgtagatgacgatcaatattggcagtatccaccttttaaacttaccaacaaagatgaatggttatacggtcgtggcgttagcgatatgaaaggtggtatgtcttcattattctacgtcttggagcaattacatcaagcggggcaacgtccagaaggtgatattattgttcaatcagtagtcggtgaagaagtaggtgaagcaggaactaaacgtgcatgtgaaataggacctaaaggtgacttagcccttgtcttagatacgagtgagaatcaagcacttgggcaaggtggcgtgattaccggatggattacagttaaaagtaaaaatacaatacatgatggtgcgcgtagtcaaacgatacatgctggtgggggcttgtttggtgcaagtgccattgaaaaaatgacaaaggtgattcaatcgcttaatgaacttgaaaggcattggggtgtcatgaagaagagtcctggaatgcctccaggtgcgaatacaattaacccagctgtcatagaaggtggacgtcaccctgcatttattgcagatgaatgtcgattatggattactgttcattacttaccgaacgaaagttatgaatctgtagttaatgaaatagagcgatatttaaataaggttgcagaagcagatgtatggctcagagagaatccacttgaatttgaatggggtggtacatccatgattgaggataaaggagaaattttcccaagtttcactgttccgacacatcatccaggttttaaacaattagaagaagcacatgaacatattcataataaaaagcttgaacatggtatgagtacaactgtaactgatggaggttggacagcacattttggcattcccacgatattatatgggccaggtagtttagaagaggcacatagtgtagatgagaaaataaaagcaaaggaattagctcaatatagtgatgttttatatacatttttaaaagaatggtatgaacacccacaatcctataaatcatcatag

SEQ ID NO: 8904 - DNA, 693 bp, Staphylococcus epidermidis
atggcaaaagttaaagagaaagttgcagtcgttacaggtgcgagtagcggtataggagaggcgattgccaacaagttaagtcaacaaggtgcatcaatagttctggttggtcgtaacgaacaacgcttaaacgaaatagtccagcaattaaataacccggctaaagttgttacagcggatgtcactgtaaaatcgaacatagatgatatgttaaaagctgtaatagaccattttggtcatatcgatattgttgtgaatagcgcaggtcaaagtttatcatctaaaattacagactataatgttgagcagtgggatactatgatagatgtaaatattaaaggtacactccatgttttacaagcgacattgccttatttgttaaaacaatctagtgggcatatcatcaatcttgcatcagtatcaggatttgaaccgacaaagacgaacgccgtttatggtgcgacaaaagcagcaatacatgcaatcacacagtctcttgaaaaagaattagcacgtacaggcgttaaagtgactagtatttcaccaggaatggttgatacccctatgacggaagggactgattttggggaacgcaaaaaacttgaagcacagaatattgctgatgctgtagtatatgctttaacacaacctagtcacgttaatgttaatgaagtaacgataagacctgtttaa

SEQ ID NO: 8905 - DNA, 150 bp, Staphylococcus epidermidis
gtgaacaagcgagacgatatacgtataccattttcaagtgaaaacgatgttaaaaataaattgtttaatattgtttatgcttacaatgctgtaaaaaagaactttaaacaggctgaagactctagaaatcctagaggtcaaaacctttaa

SEQ ID NO: 8906 - DNA, 192 bp, Staphylococcus epidermidis
atgagaaatgctatagaagaattaatcttctccgatgtaagtagttatgacatctatgtaaacacaggcgttaaccaagggttggttggagacataaaagatggatatttgacgattgattctatcccatatattgatgctgaaagattatactattatagtttagagcgcaaagccctcgttacaagttga

SEQ ID NO: 8907 - DNA, 2859 bp, Staphylococcus epidermidis
ttgagtaatttgatacaagatattaagcaatctttatataagggatttatagataaagatagttcccataaaggcaattttgttccaagattactagtaaataacaaagaagaaaatgtactttctactattatagatcagctgcataattgccaatcattttgtatttcggttgcatttataaccgagagtggtttagcaagtctaaaatcacatttttatgatttaagtaagaaaggcgtaaaaggaaggataataacatcaaattacttaggatttaatagtccgaaaatgtttgaggaattattaaaattagagaatgtagaggttaaattaacaaacattgaggggttccatgctaaggggtacatatttgaacatcataatcacacttcttttattatagggagttcgaatttaacttctaatgcattgaaattgaattatgaacataatttatttttatctactcataaaaatggagatcttgttaacaatattaaacataaatttgatgaactttgggattctagcttttctttaactaatgaatggataaatgaatataaacagtcttttgaatatcaaacattgcaaaaagtatttgataacactgtcgttcaaaattcagaaattaaaaagtttaatgagtcaaaacttataaaacccaatttaatgcaagaacacgctttaaagtcattagaatctttgagaaatgtgggaggagaaaaggggttaattatatctgcgacaggaactggaaaaactattttatgcgcacttgatgtaagagcatattctccagataaatttctatttattgttcataatgaaggtatattaaatagagctatagaagaatttaagaaagtatttccatatgaagatgaaagtgattttggattattaacaggaaagagaaaagatcatgatgctaaatttctttttgcaacaattcaaacactttctaaaaaggaaaattataaattctttaactctaatcattttgactacatcgtttttgacgaggcgcatcgaactgctgcatctagttatcagaaaatatttaattattttaaacctaactttttgctaggaatgactgcaacaccagaaagaactgatgaattaaatatttttgaattatttaattataatattgcttacgaaattcgtttacaagaggccttagagagtaatattttatgtccttttcattattttggagttacagattatattcaaaatgaaatgagtcaagaagatgcatttaatctaaaatatttagcatctaatgagcgtgttgaacatatcataaaaaagactaattattatggttactcaggtgatgttttaaaaggtttaatatttgttagtagtaggggtgaggcgtatcaattagcaaaccaattaagtaaacgtggtatatcatcggttggtttgacaggaaaagattctatagcttatagaactgaaacaattcaacaactaaaagaaggatctattaattatataattactgttgatttgtttaacgaaggaattgatattcctgaaataaatcaagttgtaatgttaagacctactaaatcaagtattatatttattcaacagcttggtagaggattaagaaaaagtactaataaagaattcgttactgttattgattttattggtaattataaaactaactatatgatcccaatagccttatctggaaataaatctcaaaataaggataattatagaaaattcttaacagatactacggttttaaacggtgtttcaacaataaattttgaagaagtagctaaaaataaaatttataattcactagattctgttaaattaaaccaaccaaaattaattaaagaagcttttaacaatgtaaaagaccgtataggtaaattacctttactcatggactttataaataacgattcgatagatccaagtgtgattttctcacgttttaaaaattattatgagtttttaataaaaaataaaattattgagaatgaattaagtattaatgaatttaaaaatttaacatttttatcaagacaattatcacctggacttaaaaaagtagatattgatgtattgaaagaagttatacaaaatgacgtaacttatgaaaatttaacaaaaaaaatgttaaacattaataacgatatttctgaatatgatattaacacttcattaagcattttagattttacttttttcaaaaagactataggtaaaacttatggactacctttaatacaatataaggataatcttatttgtctagcaaatgaatttaaagaggctttaaataaaccactatttaacacatttgttcatgacttaattgatcttgctaattataataatgacagatatcaaaataagaaaaacagtttaattctatataacaaatattctagggaagattttgttaagttattaaactgggataaagatgaatctggaacaatcaatggttatcgtatgaaacatcgtacacttcctttatttatcacttatgataaacatgagaatatcagtgataatactaagtatgacgatgaatttttgagccaagacgaattgaaatggtacacgcggtctaatcgtaaattaacttcaccagaagtacaaaatattttaaagcatgaagaaaataatacagatatgtatatatttgtgaaaaaaagagatgatgaagggaaatatttctactatttaggtaaagccaaatatattaaaggaactgagaagcaagattatatgcctaatggaaatagcgtggtaactatgcatttatcaatgaatacgtccattcgagatgatatttatagatacatcacttaa

SEQ ID NO: 8908 - DNA, 393 bp, Staphylococcus epidermidis
ttgaaaaaggaaattaatgtagtaggtgctattatatattctgataacaaaatattatgtgcgcaaagaagcgaaaatatgagtttacccttaaaatgggagttcccaggtggaaaaatagaaaatggggaaaccgaaaaagacgcattaataagagaaattaaagaagaaatgaaatgtgatttaattgttggtgataaggtaacaaccacaacttatgagtatgattttggaatagttaacttaacaacctataagtgtgaacttaacaataaaaaaccaactttaactgaacataaggaaataaaatgggtaggaaaaaatgaactagataaattagattgggctccagcagacgtacctgctgtaagacgtataatagaggagaattag

SEQ ID NO: 8909 - DNA, 1491 bp, Staphylococcus epidermidis
atgatatatacagtaacaagcacattacccttagtgcacggaggaagaactaaatcattattaacaagaattcgatttcttgataaagaaatgggcattcacaataaaatattaacaacgaattataacgccaattataacgaagtttatcaaaagttcgaagagaatcaactcataacgaaaaatacgcaaatcgaaaacatatatgattggttatctgatttcaaattactttcaatacctaaaagtagatttaagaaaaaaacgctttactctgaaaaagatagagacatagaaggtttaacttctaaagcattcaatgatggcaatgtgatgagatattatgatcaagaaacttatgttttatatcggaaattttatgaagatacaaatatcatagaatttgaagacgtgatgtcaccaatttctaagaaaaaaattgaacgtagagaatataatcacttcggtcaattgcatagaaagatttacttctcaagccgtacatatcacaaaattttggaagaatattttgacactgagggaagtatttactgtaaaaaattcttcaattcacaaaaggcaaatgaattagattttattcaaatttttaaaaatcaacgtatcatgaaggcttttaaaaacgaaaaagatctctttaaatattatttcgaacatcgctttaaacaaaatgatattgtgtttaatgatgctagacttttagataaaccacttttaaataactgtatgaacacaaaaaatgtgcttgtatttcataatagccacatcgatggcgataatattaaatcttcatacaaaattgcattggaaaattctgataaagtagctcaatacctcttgctcacacatatgcaaaaagacgatatacaacatgcatatggtattagcgatgaaaaaatatcgattgtacctcactttattaaaagctatggacaaaaagatactcatcacaaagaggatagattcgtatttattggtagactaggcaaacaaaaacaagtggaccatttaatcaaatcttataatcaattcttaaaaaatggacatcaaacgaaattagcgatttatggtgcagatgaacaaaatcaaaaacaagtcatactagatttagttaaagaatatcaaattgaagataaagttgatttaaatgattttaccaagcatcctcttgaagaatttaaaaaatctaaagcctcactattaactagtgaatacgaaggttttggtttaaccgttatggaaagtattgaagtaggttgcccagtcatttcttatgacgtaagatacggtcccggtgaaatcatagagcacggtgaaaatggctatcttgttgagccagataacattgaagcattcgcagcttatatggataaaataattaaaaatccactcaaacatgttaaaacaaaagaaacattaaagtatgaacaagcaaagaataactatcaaaagttgtttgagagagtaaagtaa

SEQ ID NO: 8910 - DNA, 1641 bp, Staphylococcus epidermidis
atgaaaaataattggatagatgtattagatgaaagtttagtcaaagatttttataataatcaaacttccgaagagcaacaagaaggacttaatactacactgtcttttggcacggctggtattagagggaaattcggtttaggtgaaggacgattaaataagttcacagtatctaaagtagcgttaggctttgcccattatttaacatcaagtatcgcgcatcctgttgtcgtcatacattatgacacaagacacttatcacctgaatttgctcaaattatcgctaatattctagcaagtcttgatattaaagtttatcttgctgatacatacagaacaacacctgatttgtcatttgcagtcagatacttacaggctgatgcgggtgttatgattacagctagtcataatcctaaagattacaatggaattaaagtttatggagaagatggtgctcaattatcaaccgacgattccgcacgactaagcacatatatcgataagttaggtcatccgcttcatattaatttacctagtttaactactgaacaacaatcattaattcattcagtcccgagcgaagtcagagaagattatttcaaaaacgtacaagacttagttggaacgattccacagtctgatttaaaagttgtctttacaagcttgcatggtacgagtgtgccagttgtacctgacatcttatcttctcttaactttaatcaatttgagttagtcgcatcacaatgtgaacctgattcagatttcagctctgtagccagtgcaaatccagaggatcataaagcctttgatcaatcgatagaactcgctaatcacattgatgctgatttacttattggcacagatcccgatgcagaccgtttaggaatagttgaacgtgatgctgaaggtaacatccactattacaacggaaatcagattggtgcacttttgttaaattatcgtatcaaacaaacagaaggattatctaacagaattatgttccaatcaattgtaagtggtggcttagctaaatctcttgctcaatatcataatgtcaatttcaaagaagttttgacaggttttaaatatatcgcagctgaaataagacatctgtctcctgaacaaaactttatttttggctacgaggaaagttatggcttcttagcccgtcctttcgtgagagataaagatgcgattcaaattgtgccattaatgattaagtatgcagctgaattaaaaaacaaaggacgcatgcttaaagatgaattagaagacattactcgaaatgtcggtaactttaatgacaagcttttctcacatacatttgaaggtactcaaggcaaggcaaaaatcgaaaatattatgactcaattcagaagtgaaacaccttcggaaatgtgtggtcttaaagtcattgcaatcgaagattttgaaacaggtaaaaagactgacttacaaaatgatgaagtcagcgatataactttacctaaagcgaatgtaataaagatatactttaatgaaggatttattgctttgcgtccttctggtacagagcctaaaattaaactttatgtatcactttcttgtgaccattttgacgtagttgcacaaaaaatgaacgatgctatatttaactcttaa

SEQ ID NO: 8911 - DNA, 867 bp, Staphylococcus epidermidis
ttgaaaaagataaaaaaagcaataattcctgccgctggtttaggtactcgttttttaccagcaactaaggcgatgccaaaagaaatgttaccaatattagataaaccaacaatccaatatatagtagaagaagcttctaaagcagggattgaagatattattatagtgactggcaagcataaacgtgcaattgaagatcactttgataatcaaagagaattagaaatggttcttgaaaataaaggaaaagcagacctgcttgaaaaagtacaatattcaacagatttagctaatattttttacgtacgacaaaaagaacaaaaagggctaggacatgcaatacatactgcaaaacagtttatcggtaacgaaccatttgcagtgttattaggagatgacattgtagaatctgatacaccagctattaaacaattaatggacgtttatgaagaaacaggccattcagtaataggtgttcaagaagtgccagaatctgatacacatcgttatggtgtgattgatccttctgctaaagagggaagtcgatatgaagtacgtcaatttgtagaaaagccgaaacaaggtactgccccttctaatttagcaatcatgggtcgttatgtattaacaccagaaatttttgattatcttgaaacacaacaagaaggtgctggaaatgaaattcaattaactgatgcgattgaacgaatgaatagcaaacaacaagtatatgcatatgattttgagggtaatcgttatgatgttggagaaaaattaggatttgttaaaacaacgattgaatatgctttaaaagatccagaaatgagtcaagacttaaaagcattcattaaacaactagatatttaa

SEQ ID NO: 8912 - DNA, 1359 bp, Staphylococcus epidermidis
atgtttggagagatttggccactcatcagtgttgtattaggaattattatcttattaacattaattattggattgaagcttaatacgtttatttcattaatcattacctcaatgataacggcgttattattaggtatgccacttaacaaagttatggaaaccattgaaaatggtatgggtagtacgttaggtcatattgctttaatctttggcttaggtgcgatattaggtgaattattagccgacggtggtggcgcaacacgtattgctgatacacttattgcaaagtttggtcagaaacatgttcaatgggctatgttgatagcaacatttatcgttggtattgcgctattttttgaagtaggtcttgtactattaataccactcgtatttacagtagctaaacgcgcaaatgtatcaatattaaaattgggactaccaatggttacagcgttatctgttacacacggattcttaccaccacatcctggacccgttgtcatcgctaaggagcttaaagcaaatataggtgaagttttgttatatggtatgattattgctatccctgtaacacttattgcaggtccaatctttaatcgatttgcacaaaagatggttccaacagcctatacgagagaaggggatatttcttctttaggtactcaaaaggaatttaaagaagaagagatgcctggtttcggaataagtttattgactgctattttacctgttattcttatgttgatttctacaattgtgcaactgattacaggacacgaagaagcaacaaatgtattcgaacaaattgtttacttcataggaactgctggtactgcaatgcttatcgcagtgatatttgcaatctttacaatgggaatgaagcaacaacgaaaaatggaagacattatgaaatcagttacgcatgctatttatccaatcggcatgatgttactcatcatcggtggtggtggtacatttaaacaagtgctcatcgatggtggcgtaggtgatacaatcgctaagatgtttgaaggaacaagcatgtcgcccattttattagcatggattgtagctgcagtcttaaggatttcattaggatcagctacagttgctgccgtatcaacaacaggcattgtgttaccacttttagaacattcagatgttaatgtagctttggtcgttcttgcaataggtgcaggtagcgtaattctctctcacgtcaatgatgctggattctggatgtttaaagaatatttcgggctgacagtcaaagaaacatttttaacatggtcgttattagagacaattatttcagtatctggtattttatttattttatttatcagtttatttgtatag

SEQ ID NO: 8913 - DNA, 1542 bp, Staphylococcus epidermidis
atgaaatatatgattggtgtagatatggggacaacgagtacgaaggctgtgctatatgatgaaaatggtaagtttataatgaaacataatattggctatgacttacatacaccaaacgtagatgtgtctgaagaaaatcctgatgaaatatttgatgctgtgcttatgacggttaaatatattgtaagagaatctggcatcgcaaaagaagatattaagtttatttccttgagtgcacaaatgcatagtttgattgctatgaacgagaataatcaacgtttaactgaaaatatcacttgggctgacaatcgtgcgaatgattatgctgatttaatagaaaaatcatatggcggttttgaattgtatcaacgaactggtacaccgattcatcctatgtcaccattatctaaaatcttttggatgagacatgaggaaccgaaaatatttaaacaaacagctatgtttgcagatttaaaaacatacgtactgtttcaattatatgaaagattcgtcattgattattctttaggatcagctacaggtatgatgaacttagaacaattagattgggataataaagctttagaattgttaggtattgaaagaaatcagttaccacaacttgttccaactacacatgttttaactggaatgaaaaaacgctacgcaacgttgatggggattgatgagcaaacgcctgtgattgtcggagcgagcgatggcgtattatctaacttaggtgtaaatagttatcaaaaaggtgaagttgctgtaactattggcacatcgggcgcaattcgtacggtaattaatcagccaaaaacagacgagaaggggcgtattttctgttatattctcgataaagatcaatatgtgattggcggtcccgtcaataatggtggtgtcgtcttgagatggttacgagatgaaattttagcgagtgaagttgaaacggctaaaaggttgggggtcgatccttatgatgtgttaactcagattgccagcagagtaaaaccaggtgcagaaggattaatttttcatccctatttagctggagagcgcgcaccattgtggaacgctgacgctaggggttcattcttcggattgacattatctcacaagaaagagcatatgattcgtgcagcattggaaggtgtattgtataacttatatacagtttatcttgcattaattgaagtgatgaatgaaacaccgacaacaattaaagcaacgggtggttttgctaaaagtgaaatttggcgacaaatgatggcagatatttttgatacagacttaatcgtacctgaaagctacgaaagttcatgtctaggtgcatgtgtacttggaatgaaagctctgggagaaatagatgatttttcagtcattaaagatatggttggtacaacacatgcccatgaacctaaccaagaaacagttgccatctaccaacaacttgttaccattttcattaacattagtcgttctatgactgagaattacagtgatattgcgaatttccaacgagaacatttaagtgattaa

SEQ ID NO: 8914 - DNA, 681 bp, Staphylococcus epidermidis
gtgacgtatggttatccgaaaaagtggaaggaaaacatgacttcaggacaagtaatagctgctgagttacgtttaggaatagtgagtggtgagattgaatcccatatacaactaagtgaaaatcaagttgcacaacaatttaatgttagtcgttcaccagtcagagatgcatttaagttacttcaaacagatcaactgattcaattagaacgtatgggcgctcaggtacttccttttggtgatcaagagaaaaaggaaatgtatgatttgcgtttgatgctcgaatcattcgccttttcaaaattaagtggaacagatacacaacatattggtaaggaaatgaaaaagcaattagaaatgatgaaggttgcagtccaatttgaggatgctgaagcatttacacaacatgattttgagtttcatgaggtgatgattcaagcaacaaaccatcagtatcttaaagtgttttggaatcaccttaaacctgttatggaatcactcatactcatttcaatgagacaaagaatggcaaatgaccccaaagatttcgagagaattcataaaaatcatcaagtttttatagatgctgttgagaacgatgatgcctccatattgagaaaagcattccatttaaattttgatgatgtaggagaaaatattgaagcattttggttacgttaa

SEQ ID NO: 8915 - DNA, 1359 bp, Staphylococcus epidermidis
atgtttaatttcttaaaaccagctagacatatcaaatcattgccatcagaaaaagtagatgatacgtataaaagactacgttttcaagtctttttaggaatatttatcggttatgctggttactatttattaagaaagaacttctctttagcaatgccttcattaattgagcaaggctttagtaaaggtgaattaggtattgcattatctgcagtatctatcgcatatggctttagtaaatttgtaatgggaactgtcagcgatcgaagtaatgctcggatgttcttaactttaggtttagtattgacagcaattattaacttattattaggatttattccattctttacttcaagcataactattatgtttatcatgctttttttagttggttggttccaaggaatgggctggccaccatctggacgtgtgttagttcattggtttagtgtcagcgaacgcggaagtaaaacgtcaatatggaatgtagcacataatgtaggcggaggtttaatggcacctattgctacgtggggtatttccatgactgcattatacaacttcggttatttaaaagggtttgaaggcgtctttatataccctgcactattggctatcattattgccatcttgtcttacatactaattagagatacaccacaatctcagggtttaccaccaattgagcagtataaaaatgattatgccacttcaactaaacaaacaattgaaacagaactaactactaaagaaatattatttaaatatgtacttaataacaaatgggtatgggcgattgcttttacaaacattttcgtttattttgtgcgttatggtgttttggactgggctccgacatacttaagtgaggaaaagcattttgatttaagcgcttcaggttgggcttacttcttatacgaatgggcaggaattccgggcacgctactctgtggttatctatctgacaaactatttaaaggtcgtcgtggtccagcaggcttcttctttatgttaggcgtaacaatctttatccttatatattggttaaatccaccaggtcacgcatggttagataatctttcattaattggtattggtttcttaatttatggtccagtcatgttaattggtttacaagcgttagattatgttcctaaaaaagcagctggcactgcggctggtctaactggtctatttggatacttattcggtgcagttatggctaatattgtattggggtttgtagttcaacattttggatggcatattggctttgtgttattaacagtcatcagcatactcgctatgttatgtttcattttaacttggaataaacgtggtcaagaacaaatcgactag

SEQ ID NO: 8916 - DNA, 723 bp, Staphylococcus epidermidis
atgtctatgtcgatttatacttcaggagatatagctcataaatgccatgtgtcaacacgcactattcagtattacgataaacaaggaattttatcgccaaactatactactgaaactaacagacgcttttacactgataaggaagtggagaaacttgaactgattttactacttaaggaaataggttgcacaattaaagaaattaaagtgttattaaaagatgattcatcaatgaaatctctttacacgtttcttcaaatcaaaaagcatgaaatacaagagtcaataacagataaagaaaacaaggtatgtaaaatagagcaaattcaacgctatgttcatcaaaattcaatttctccaattcattatttacaagatatagctatttatatggaagaatctcatagactcaaaggtgtcagaaagaaattatggttaagtatagctctgattggttcattacaatatggtggtttgatcacctcaattgtaactcaaaggaaaaaacctttcttgtcgatgatgcctgtggtagctatgtattcactttggttaacgaaaaagtataaaaagaatgtttcatatgtctgtcctaattgccaccatgtgtttaatcctagtgtcattcattttgtaacagcatcacatacacctaaaactagaaagcttcaatgtcctgattgtcacgaaatgcattactgtgtagaaattgctaagcaatga

SEQ ID NO: 8917 - DNA, 876 bp, Staphylococcus epidermidis
atgattaagcaaaattttacaactaaagtttatccacttaaacaatttgaaggagaatatagtgaagttgcctacgcaggagatagccaagctgatgatgtgattgtatttattcatggtgcactcttaacatataaaattatgacgatgttcgaaccttacttcagagattacaaattaatatttattaattgtccaagtcgtggtaaaagttcagatttagatcgtgacactcatacattagatgattacgctgcacgtatatatgatgtattaacgcaaattgttaaggagcaacaaataaaagaactgagtattgtcggttattcaatgggaggaatgattgcgacacggttacttaagtataatacattaccagtctctcatcttatttatttacatagcgcagcgaaaattactccagatgcaagtatgttagcacgattatttactagtgaaagtaagagagcagtgttaaaagatgaaattaaggcagtgaaaaatcttcctcaatatatactagataaaacgatttatgcacaaaaggaaaacgcacttgatttggtacaatttattgcacctattaaaactataattacggatatgatttacacgattaatacagattatttaccagatatcgatgagattaaacaatttccgaaaatattatttatgtctggaaaagaagatcaaattattccttatacggattctcaagctacgttagaaaagtttaaggcgttaggtggagaaactaaagaagttatttatccaggaattggtcatatcgatttcccaagtgttttagaaacccaatcggatggacaaactggcgtggtagatgaaattaaaacgtggatttcaaaaaaataa

SEQ ID NO: 8918 - DNA, 918 bp, Staphylococcus epidermidis
atggttatttcaaaaaaattatcacttatcactataggtatcttaataagtattcttttaatttcacctcttatcgatcaacagatttcaaatcatttcatgaatcaagattcaattttcggtactttatttcaaaactacggtttatttccacctacgcttatattaattatttcaactgtaattttaaattattatattttcactacatttcaaaataaattagctaaaatattaacattgcttatatcttttatctttacgttgataaaaaccaatgaattcgtgtcagaaaccgctcaatatatgttatctacatcagaaaacatcaaaaatcataaaccaatgggtatggcaaataatgaaggaaacgctggaaatgctttatctttaggaatgagtttctttatttctttgattaccattataattatcactattatttgttatcagttttggttaaaacatacaaataaccaagaacttgatcatttattcaaagtttcacttattagctttatgattttatttattggattagaactcgttgatagcttgaaacatttatggggacgttttagaccatatgaaatcactgacaaagctggacatttcactcactggcttacaataaatggaaacactggacatagttccttcccttcaggacacactggaaatggtgcatttctaatgtttatcgcattttactttaaaaaaatacgcactcaaaaaatagtgtttagtatcggattatgttatagcattttaatggcattgagcagaattcgtattggtgcacatttcactagtgatgtaacaatgagcttgcttattatgttttcactcatggttattgcagattttatcattaataaagtcatatctagacataaaaacaagctaagtaaagactag

SEQ ID NO: 8919 - DNA, 702 bp, Staphylococcus epidermidis; identical to SEQ ID NO: 5699

SEQ ID NO: 8920 - DNA, 414 bp, Staphylococcus epidermidis; identical to SEQ ID NO: 5698

SEQ ID NO: 8921 - DNA, 1917 bp, Staphylococcus epidermidis
atgcaacaaatcattaactctttgatacacttcgaccgttcaaaaattgatatagctaaaggaatacgacaaggatttttaatgatactaccagcattgataggttacttattaggattccctatgtttggtattttaatatcaacaggtacgctagcacatgtctacgtttttagtggatcaccgcaatctatgttaaaaacagtcatcacctgttcactatcatttactatttgcatgattcttggcaccttaacagtatctcagcctattttatttggattactattactggttgttgttacaatcccatattatacgtttaatgcactaaaaatcgctggtccatcatcgacattctttttagtaacgttttgcttatctataaacttaccgatagccccagaagaagcgcttttacgtggatctgcaattctcattggtggtatattggctaccataacagtaattttaacaatcatatttgctaaagagaaagcagaagacagagcaattcatgcggattttaaaacattacataacttgctacatcattttgatgagccagaggatttcaaagcatatgctcgaaacgctgttacagaatttagaaattctgaaaaacttttaattacctcaacatcaggtggtaatggaaaattaagtaaaaggtttcagaaattaattttattacacacatcagcacaagggatatattcagaattactagaactcaatgaaaatcatattcgtccattaccaagtgacttagttgaaatgatggatcatatcattaatagtgttcaacaacctaaacaacaatatcgaccgtggtcaaaagttgttgatgtggcaccagaatttcaaaatttaatggatcatattttgaaaatagatgaaatgattcacgcaaacgataatcaaattaaatatgaagcagatattcgcaagcctttatatagtaagcgaatatatcaaaatctaactttcgactcaattgtatttagaaatgctttgcaatatacagttattatggcagtagctatatttattgctctagcgtttaacattcaaaaagcgtattgggtgccattgtcagcgcataccatcatgttaggtaatgtgacaacgattcgtacgttagacaggtcacttgctagaggtattggaacgataatcgggactattgttttgtcgggaatcttggcatttcatatcgatcctattttcgctattatcattatgggattttctgccatgatgacggaagcgtttgtggcatctaactatgcatttgcagtcatttttattacgacacaagtcattatgctcaatggtctagcctctcaaaatttaaatattgagatagcgtacacccgaattattgacgttctgataggtatagctattgcagttattggtatattcatactcgcgcgtaaaactgcatcctcaatgttatctgatgctattgccgaattggtacgtaaagaaggtattttatttcattatttattttcaaaaaataaacaggaaacgaatgaacgtgatagggtagaaagtttaaatttaaacgtcaaaatcagtaatgtgacacagatttacaattcagcgaatggtgaattgtttagtaataaagaagcggtaaggtattactatccaagcatatttgctctagaggaaataagttttatgctagagcgtgccatgaataataaacatcgacaaacaataaatgatgatttaatgggtgaatatttagtcgtatttgaaaatatagctaagcatttccaatttcaagcagatttaaatctcagagacatgcaaccattacctcaatacaattacatccgtgcttcccttatgaatatacaacgtaattgtgttgaacaacgtcaggccatcacaaaagattaa

SEQ ID NO: 8922 - DNA, 291 bp, Staphylococcus epidermidis
atgattataattaatgctaaattaaaaatcgatgctaataaacgcgaggattatctaaaacttatgaaagaattagtcataaattctagaaaagaagatggtaatttattctatcatcattacgaagatgtaactgagaaaaatgtctttgtcgtagttgaaaactataaagacgaacaagcggttcaagcacacaatcaatcagatcactttaaagtttttagtgataatattagtcaatatttaattgaagaacctcaaattgatgtaagtcaacctattcaattataa

SEQ ID NO: 8923 - DNA, 1275 bp, Staphylococcus epidermidis
atgaaagaaaaacgtagtaatgttcgttggtattttgcaatagggttcttctttattggggttattgcttacatggatcgatctaacatatcttatattgcagtaccgatgatgaaagatttggggttaactaagacacaatttggtttattagcatcatttttctccctaggatatgcattaatgcaagtaccttcggggatgttagcagagaagtttggaccacgtaaaatgattactgtcgctttagtttggtggagtgcatttaccatcttaacagggatgattaaacatcatggtttactttactttattagattcttatttggtgttggtgaagcgccaatgtatccatccaatgcagtttttaactctttttggttcgctaaaaatgaaaaaggtcgtgcatctagtgcgttgttagcaggatcttattttggtccagttttagcacctatcatcacgatagccattgtcaatgcttttaactggcaagccgttttctatattttcggggttgtaggaattttaatggcagttctttgggcaattattgctaaagacttaccagaacaacataaaatggtaaacgatgccgagaaaagatttattactcaaaatcgtgatattgtcgcaactgagaaatctttaccaccgtggaaacgttttttaagtcatttcagtttctacgcaatcgcattgcaatactttgtagttcagtttgttatcgcgttgttcctaatatggttaccaacatatttaactgaacaatatcatgtgaatttcaaagaaatgactatcagtgcattaccttggttatttatgttcttcttaattttatttgctggagctatttcagacaagattttgaatacaggtcaatcacgttttgttgcacgtggcgtaattgcgattgcgggatttgtggtattctcaatttcaattttcttagcagtacatacagacaacttatatgtaaccattttctggttatcactttgtttaggtggcgtaggtatttctatgggaatgagttgggctgcagccactgacttaggtcgtaatttctctggaactgtgtcaggttggatgaacttatggggaaatgttggcgcacttattagtcctttacttgcaggaattgttgtagatcatttaggatggtcaatgacattacaactcttaatcgttccggctattatagcagcaattctatggttcttcgttaaaccagataaacctcttattgttagtgaagaacacgttaataaataa

SEQ ID NO: 8924 - DNA, 600 bp, Staphylococcus epidermidis
ttgggggggatatttatatttattgcgattacatatcataaacaactgactagggacgatttacagcattataaacatatcgaagaagctattgatggcttgttatttcgcacttccatgaataacgaagaaaacaaggacatgattcaatctttacttcaattgggttttagtaaagataaaataattattcatagcgatgtgacactgttagaggatttacaccttaaacgtatccattttaaagaaaatgacacaactgctttcacatataaagaagctcatcctgatatttgtgtaagtatgtctacacatgacgttgaaacagtaaaacgatgttacgaaaatggtttggattctgtcttttttggacatatttttcctacctcttcacatccaaatgtaccaccgcgttctaaagaagctatccaacaggcattaaatgttcctatccctatttatgctattggtggtattaatgaacattcacttcaaaagatgccacctggatttaaaggtatatgtgccatatcatattttaacaatgcttcactagaagaaattaaacaattaagaaaggagtggtctactcatgcatga

SEQ ID NO: 8925 - DNA, 1119 bp, Staphylococcus epidermidis
atgcatgatgtactaatcattggttcaggagttattggtatgtcaattgctagacacctcagtgcaacacacttagatgttgcagtcatagatagagatgtacctggaaagcatgcgtcatataaagctggaggtatgcttggtgcacaaaatgaatttacagaggatagtgacttgtttcaattagccatcgaatctcgtgctatgtttccacaattaagtaaatcattattagatgaaacaggcatagacattcaatttaaaaattcaggacttatcaaaattgctaatgaacacgatgatatctcatctataaaacgacaatatcaatttctgaatagtcaagaccgtagtgtcaaacaattatcagatgatgatttgctacaacttacacatggtgaagttaaaccttcatacgcggccattcacataccacacgatggtcaaattaatgcacatcattacacactggcattagtagaatcaatgaagttaagagagattaagcgttatgagtctacagaggtcacttcaatagaacggcataatggctattattcagtgaaaaccgatcaatcttcaacaattgaagcgcacaaaattatcgttgcaggtggcgcatggtcttcgcaattattaacacaatatcatctacaacgacaagtgattggcgttaaaggtgaagttatcttattagaaaataacgatctttcacttactgagacattatttatgactaatggttgttacatcgttccaaaacaacccaatcgttttttaattggtgcgacgagtgaatttaataattattctgtcggtactacagatgaaggtatggattggcttcttcgccatgcatatcatcgtgtacctcaactaaaagacagtcatatactgaagaaatggtcaggagtaagaccatacacagaaaaagaaatgccagtcatggatcaaattgatgatggcttatacgtaataagtggtcattatcgaaacggaatattattgtcacctattatcggtcgtgacattgccaattggctactttctggtattaaaccatcacgttattcaagttttacagttacaaggaggaataatcatgaagtgtatcattaa

SEQ ID NO: 8926 - DNA, 201 bp, Staphylococcus epidermidis; identical to SEQ ID NO: 5692

SEQ ID NO: 8927 - DNA, 768 bp, Staphylococcus epidermidis
atgtttaaaataggaaatttagaattacaatctcgtttacttttaggtactggaaaatttgaaaatgaagaggttcagtcaaaagcaattgaggcatctgaaacaaatgtacttacatttgcagtaagacgtatgaatttatatgatcgtaacctacctaacccacttgcaaacgttaatttaaaagattttatcacttttccaaatactgcaggtgccaaaacagctcaagaagctatcagaattgctgaaattgctaatcacgcaggtgtatgtgacatgattaaagtcgaagtcattggtgatgacgaaacattattacctgatccattcgaaacatacgaggcatgcaaagtattgttagaaaaaggttacactgtttgtccttacatctctaacgatttagttttagctcaacgtttagaagaattgggtgtacacgcagttatgccacttgcatcccctattggtacaggaagaggtattaataacccattaaatttaagttatattatcgaaaatgctagtgtacctgtaatcgtagatgctggtattggttcccctaaagatgcgtgtcatgccatggagcttggcgcagatggtattttactcaacacagccatttcagcggcaaaagatcctgtgaaaatggctgaagcaatgaaattaggtataaatgctggcagactttcatatgaagctggacgcattcctgttaagtatactgcacaagcatctagtccatcagaaggtttagggttcttgtaa

SEQ ID NO: 8928 - DNA, 999 bp, Staphylococcus epidermidis
atgtcgcgttatgaacgtcaaacacgctttgcaccatttggagaagagggtcagcaaaagctatcctcctctcaaatacttatttttggcgctggtgctttaggaagccatattgtagatcaactcgcacgcatgggggctcatcatattgcaatcgtcgatatggatattgttgaaatttcaaatttacatcgacaaacactcttcgatgaagaagacgcacatactttaatatccaaagttgaagcaatcaagcataaggttaatcaaattaatataaatgtcaatctaacaacttatgatttagaagttacttcatcaaatatcgaaaatttgataaaaaatgtcgaaccagacatcatcattgatggcatggataacttcaaaatacgatacctgattaatgaggtttgtcacaagtatcaaatcccatgggtttatggtgcagctgttggtagtaaaggatcagtatatggaatagatcaccaaggaccatgtctaaaatgtttattgcaaacaattcctgacacaggggaaagttgcgctattaatggcgtaattccccctgttatatcaatgattgcaagctatgaagtagcagaggccgtacgttatctttcaggaaaaggattttcaaagcaattaatcactattgatgcatttaatatcaattataagtcaatgaatgtagatgcactcaaaaataaagattgcccagtgtgtgaaaaacatgaatatacgttactagaaagccaacaagaacgtactattgaggacttgtgtgggaatgcttatttatttagattcccacctaaagcttttaaacacgctgcccatttccctgggaatatggtgaaatctacttcctttgccaaattaattcaatatcaaacttatgaattcaccttgtttaaagatggtcgtatgaatgcatatggtatacacaatgatgaagaagcacatcacctatacaatacgttgttaaaatccatacgctaa

SEQ ID NO: 8929 - DNA, 615 bp, Staphylococcus epidermidis; identical to SEQ ID NO: 5689

SEQ ID NO: 8930 - DNA, 1965 bp, Staphylococcus epidermidis
atgacccatattacagaaagtgaaatgaaacaaaaatatctagatttactctcacaaaaatttgacagtgcagaaaaacttgctactgaaattattaacttagagtcaatcttagaattacctaaagggactgaacattttgttagtgaccttcatggtgaatacgaatctttccaacatgttttaagaaacggatctggaaatgtgcgtgctaaaattaatgatatcttcaaagataaattatcccagcaagaaatcaacgacttagcagcattagtatactatccggaagaaaaactaaaattagttaaaaataatttcgattcaatcggaacattaaatatttggtatattacaaccattcaacgattaattgatttaattacatattgctcatcaaaatatacacgttcaaaattacgcaaagcattacctgaacaatacgtttatattattgaagagctactttacaagagcaatgaatttcataataaaaagccttattatgaaacattagttaaccaaattattgaattagaacaatcagatgatttgatcattggcctttcctatactgtacaacgtctagtcgtagaccatcttcatgtcgtgggcgatatctatgaccgtggtcctaaacctgataaaattatggatacattaataaattatcattctgtagatatccaatggggaaatcatgatgtattatggattggcgcctatgctggttcaaaagtatgtcttgctaacctactacgaatctgtgcacgttatgataatttagatattatcgaagatgcatatggcatcaatctacgtcctttacttacgcttgctgaaaagtattacgatgctgaaaacccagcgtttaaacctaagaaacgaccagataaagacgtcagtcttacaaaacgcgaagaaagtcaaatcacaaaaattcatcaagcaattgcgatgattcaatttaaacttgaaatgcctattattaagcgccgtccttcttttgagatggaagaacgtttagttttagaaaaaatagattatgataataatgaaatcactatatataataaaacatatccgcttaaagatacttgtttccaaactgtaaaccctaacaatcccgctgagttactagcagaggaaaaagaagttatggataagctattactttcattccaacaatctgaaaaattaagacgtcatatgtctttccttatgcgaaaaggaaaattatatcttccatataatggcaaccttttaattcacggttgtattcccgtcgatgaaaatggagaaatggaatcatttgaaattgaaggtgaacgtttaagtggtcgtgaactactcgatgtttttgaatatcatgtaagaagagcttttgaccataaagaatctaccgaagacatttctacagatttagtatggtatctttggacaggtaaatattcatctttatttggtaaacgtgccatgacaacgtttgaacgttattttatagaagataaagcatctcataaagaggagaaaaatccttattattacttacgtgaagatgttgatatgatacgtaaaatgttaaaggattttggtcttaatccagatgaaggacgtatcataaatggtcatacgcctgttaaagaaattgatggtgaagatccaattaaagctaatggtaaaatgttagtcatagatggaggattttcaaaagcttatcaatcaacaactggtattgccggatacacacttttatataattcatttggtatgcaattggttgcacataaagagttcaatagaaaagaaaaagtgttatcaatgggggcagatgaattgtcagtgaaacgcgttgtagatgaagaattgcaacgtaaaaaaattagagataccaatatcggtaaacaacttcaagatcaaattgatatcctcaaaattttaatgcacgaccgatatttaacataa

SEQ ID NO: 8931 - DNA, 1788 bp, Staphylococcus epidermidis
atgtcattggaattgcccgtgatgctaacgattgtattgttcttagcactaggcatttttagtcaatggttagcgagtagaataaaatggccatcgattgttgtcatggccatcgtaggtttgcttgtaggacctatttttggactagcaaacccaaaagaggcacttggacctgaggcatttagttcaattgtatctcttgctgtagcaattatattatttgaaggtagtagtaatctagattttagagaattaaaaggcatttctaaagctgttataagaattattacaataggagcgggaattgcatggattttaggagcaatcgctttacatgtcactatgaatttccctctgtctatttcatttgttatcggaggactattcctaatcactggtccaaccgtgattcaacccttgctgaagcaagcgaaagtaaaaagaaatgtcgattcagtattaagatgggaaagtattatcttagatcctattggacctattattgcactcactgcattttatgtattccagatttttgaggaagggataggctttgtcgttattattctctttatcttgaaactcttagctgcaattttaataggttttggtgcagcctttctatttaattggcttataggtcaagataaaattcctcaaagtttaatgccacccattcagcttgtatttattcttttaacatttagtatctgcgatgagatattatcagaatcaggtttactagctgtaacaatttttggcttaatgatggcgcgtaaaaaacgtcacgatctcatctttaaagaatcagaccactttatagataatgcatcatctatacttgtgagtactgtatttattttaattacgtcttctctcactaaagatgtgttgctcaatgtgttatcttggcagctcatactctttagtttggttatgattgtattagtaagaccaatttcagtgcttctttcaacattaggtactgaaataactaaaaaggaacgtgtagtagtagcactaatggcgcctagaggtattgtggttttaacagtggcacaattcttctcaagtttatttatggacgataaaattcctatggctcaatatattacaccagtaacttttggtcttgtatttatcactgtagtcatttatggatttggttttacacctttaagtaaactgttcggtgtagcaagtacggagccaccaggcgtgatcattgtcggagaaagtgaattttcgttccatcttggtattaatctaagggatcatggtatacccgtcatgatgttcaacttatttgaaaacacatcagaaaaagcccacgaagctgggttcgaagtatttaaaggtaatcttttatctagcaatgatagaatttattctgatttattacgttataataaatgtattttgatgacacaatcgtttatctttaacagtttagcatttaatgaattggtgcctgaatttggcttgaataatgtagatatgatgccagtatcttttaatgatgagcaagcacgaaacaatttaaatggtccaatcagaaatcatatattatttgatgaaaatcataccccacgttggtttaatcaatttattacacaacataatattgttgaagtaccggcagaagattatgaaaaaattacagaaaatgatatgttaatctatcatatcaatgaagataaagaagtgacgtttaaacgaagcaatagagatatacctgaacatgaaacaggtgtttatggtattttaaaaaatgcttatttaacttaa

SEQ ID NO: 8932 - DNA, 129 bp, Staphylococcus epidermidis
atggcacttgactatacgcatttatctgccatcttatttaatcataccacacttaaacgtgcaccctatttatacaatagtacatatgtggcgaactttactgtttattttttcggtaaaatcatctaa

SEQ ID NO: 8933 - DNA, 1050 bp, Staphylococcus epidermidis
atgaacaatgttaaagaatccatcattgttgccttcgcctttgtaggcgttgtagttggagcaggatttgcaacaggtcaggaaatctttcagttcttcactagtcatggtatttacagtattggcggtatttttattactggacttatcttaactcttggaggaatattcgtattaaatactggctttcgtcttaaatctcaaaatcactccgaatctattcgttattatttacatccaacaatagctaaattatttgatattatacttacagtatttttattttctctagcaattattatgacagccggcggagcatcgactataaatgaaagtttcggcttacctttttggttaagttctttcattttagtgatacttattttgataacattatttctaaagttcgatcgtcttatcgctgttttaggaggggtaacaccatttcttgtggcagtcgtagtaatgattgcagtgtattactttattaccggtgatttaaactttagtgatgtcagtcaatattcaaatcaaaataagtcgatttcacctggttggtggtttgacgcaattaattatgctagcttacaaattgctgctgcatttagctttttaactgtaatgggcggtaagctacgatatcaatcgtccacaatttatggtggacttatcggtggtattattgtgactttactattacttttgattaattttggtcttgttacagaatttaatcaaattaaagaggcagcattaccatcattgctacttgctaagcagatttctccatccattggtattatcatgtctgtcattatggttttagtcatatacaatacagtagtaggtttaatgtacgcctttgcatcacgctttagtcgaccgtttacgaaacgttattatattcttatagttatgatggcgataataacatttgcttgtacttttgtgggattcatttctctcattggtaaagtgttccctattatgggactttttggttttatcttattgattcctgtgatatacaaaggaattttacgaaaataa

SEQ ID NO: 8934 - DNA, 1425 bp, Staphylococcus epidermidis
atgacaaatcaattatttattaacaatgaatttatagaaagtcagtctaaagagacaatggatgtcattaatccagctactggcgaggcatttgatactatcactcttgcaactgaagaggaagtaaacgacgccattgaaaaatcgcaacaagcacaacttgaatgggagcgcgtgcctcaacctacacgtgcggaacatgttaaattacttatacctttattagaaaaaaatcgcgatgaaatagctcaattatacgtaaaagaacaaggtaaaactttaacgcaagcttatggagaaattgacaaatcaatctcatttatcgattatatgacaagtctgagtatgtcagataaaggacgtattctacaaaatagtattgcaaatgaaacgattcaaattatcaataaacctatcggagttactgctggtattgtgccatggaacgcaccgatacttgtccttatgcgaaaagtcattccagctatagtaactggttgttcagtagtgattaaacctagtgaagagacaacgttactcactcttcgattagctgaattattcagagcatcaactataccagcaggattgattcaaattgttcctggcactggagaaacagtaggtacacaattagcttcgcataaagacattcaacttatttctttaactggaagtatgagagctggtaaatctgtttacgaaaatgctgctcaaactgtaaagaaagtaaatttagaattaggtggaaacgcaccagtcattgtcacatcaaatgccgatttagataaagcagttgactatatcgtgacagcccgtataaataatgcaggtcaagtttgtacgtgccctgaacgtatctttgtacatgaagatgttcacgatgactttttaaataaagtaacttccaaaatgaaaagcttaactgttggagatccatttgatgaaaacaccgattacggcgcaattattaaccaaaaacaacttgatagtattcatgaaaaggttcaagatgctattaaaaatggtgcaacattgatgactggtggacatcaattaaaacgccatggtttcttctacgcaccaacggtattagatagcgttagaaaagacgataatgtgtttaaagatgaaatttttggtccagttcttgcgataacaacataccgcgattttgaacaagtgattgaagacgctaatgatacaaacgctggcttatcttcttatatcttctctgaaaatttaacagaagtaatgacagcaaccgaacgtctaaaatttggtgaagtatatgcaaattgtgaggctgaagaagtcgttaatggctatcacgcaggttggcgtgaatcaggcttaggtggcgctgacggtattcacggttttgaagagtactacaataccacagtaagttatatcagatactaa

SEQ ID NO: 8935 - DNA, 945 bp, Staphylococcus epidermidis
ttgaagaaattaattatagtgtcaatcatcattttaatgttaagcggatgcagtagctttgatcatcgtaaacgcgaaagtattaatgacaagaataaaatgaaagtatacacgactgtatacgcatttcaaagtttgacacaacagattggtggaaaatatgttgacacgcaatcaatctatcctgctggtgctgatttacactcatatgaaccaacacaaaaagatatgattgatattgccaaaagtgatctgtttgtctattcaagtcatcaattagatcctgtcgctgcaaagattacgaattcgatgaccaataatagcatgaaattagcgcttgccgaaggactcaaacaaagtgattttattcactctaaagaccatgatgaaaatcatgagcatcattcacatcatgaagaatcgaatcaagatcctcatgtttggttagatcctgttctaaatcaaaaattcgctttcatgattaaagagaaattaatagagaaagaccctaaacatcaagcttattacaataaaaattataaaatagtaaataaagatattgtgcatattgatcaactacaatcaataacgaagcattctaaaagagataaagttgtgatatcacacgattcgcttggatatttagcgcatcgttatggttttaaacaacaaggtgttaaaggtatgaatgatgaagaacctagtcaaaaagagattttgaatatcgttaaagatatacagcattcgcatgcgccttatgttttatatgaacaaaatattacctccaaaattacagatgttattaagaaagaaacagatactaaaccattaagttttcataatttagctgtattgactaaagaggagcaaaatgatgattcaatttcataccaatcattaatgaaaaagaacatttacgtattaaatcgcgcactcaataattaa

SEQ ID NO: 8936 - DNA, 282 bp, Staphylococcus epidermidis
atggctgcagaaattaaacaaggcgatcataaattctatgtaggtaatgacgaaaataacccaaaagctgttattacatttaaagagtttgataacaatgaaatagacattgatcatactggagtttctgatgaactcggtggacaaggtctaggtaaaaaattagttaatcgtgttgttgaacatgcacgagaaaacaatctaaaaattatcgcttcttgtccattcgcaaaaaacgtattagaaaaagatgatcatgcacaagatgtttatctaggatag

SEQ ID NO: 8937 - DNA, 798 bp, Staphylococcus epidermidis; identical to SEQ ID NO: 2863

SEQ ID NO: 8938 - DNA, 1494 bp, Staphylococcus epidermidis; identical to SEQ ID NO: 2862

SEQ ID NO: 8939 - DNA, 132 bp, Staphylococcus epidermidis; identical to SEQ ID NO: 2861

SEQ ID NO: 8940 - DNA, 663 bp, Staphylococcus epidermidis; identical to SEQ ID NO: 2860

SEQ ID NO: 8941 - DNA, 993 bp, Staphylococcus epidermidis; identical to SEQ ID NO: 2859

SEQ ID NO: 8942 - DNA, 810 bp, Staphylococcus epidermidis; identical to SEQ ID NO: 2858

SEQ ID NO: 8943 - DNA, 612 bp, Staphylococcus epidermidis; identical to SEQ ID NO: 2857

SEQ ID NO: 8944 - DNA, 495 bp, Staphylococcus epidermidis
atgattagatttgcgcgactagaagatcttcaaggtattttgacaatttataatgatgccatccttaatacaacagctgtttatacgtataagccacaacaattagatgaacgtcttcaatggtatcaatctaaagcaaaaataaacgaacctatatgggtttatgaaaaagaagggaaagtagttggttttgccacttattgttcctttagacaatggccggcctatttatatactattgaacattctatatatgttcatcaacagtacagaggactaggtatcgcttctcaattattagagaatttaattcgttacgctaaagaacaaggttatcgcactattgttgctgggattgatgcatcgaacatggatagtatcgcattgcataagaagtttgacttctcacatgcaggtacaattaaaaatgtaggttataaatttgatcgatggctcgatttatcattttatcaatatgatttatctgattcataa

SEQ ID NO: 8945 - DNA, 156 bp, Staphylococcus epidermidis; identical to SEQ ID NO: 2854

SEQ ID NO: 8946 - DNA, 900 bp, Staphylococcus epidermidis; identical to SEQ ID NO: 3772

SEQ ID NO: 8947 - DNA, 684 bp, Staphylococcus epidermidis; identical to SEQ ID NO: 3771

SEQ ID NO: 8948 - DNA, 1044 bp, Staphylococcus epidermidis; identical to SEQ ID NO: 6603

SEQ ID NO: 8949 - DNA, 786 bp, Staphylococcus epidermidis; identical to SEQ ID NO: 3769

SEQ ID NO: 8950 - DNA, 1491 bp, Staphylococcus epidermidis
atggtgaaagaagtagttctaggaattgatttaggcacaagcgcaataaaaattattgctgttgatcaactaggaaatgtcattgaatcagtaagcgaaacattaaagttataccaagagcatcctggttatagcgaacaagaccctaatgaatggtttgaggctactaagaaagggataaaagaattaattcaatcaacagaaatgtcagataagatagtaaaggggatttctttttcaggtcaaatgcatgggttggtcatagttgatgataatggcattcctttgagaaaagcgattttatggaatgatactagaaattcaatacaatgtagacaaattgaagatatatatggtgaaagattgaattacaatccgatattagaaggatttacacttcccaaaatgttatgggtacaacaacatgaacctgaaatttggagtcgagttgatgtttttatgttgcctaaagattatttacgttattgcttaacgcagacaattcatatggaatatagtgatgcatgtagtacattattattcaatcctgagaattatgaatggacaagagatgttggagatacatttaacattggtgatatctatccacccttagtaaaatcacattcgtatgttggaaatgtaacttcatcactggctaaagaattaggattatctagtgatgttgctgtatatgctgggggtggtgataatgcatgtggtgcaattggtgctggtgtcatccatgataaaagtgcattatgtagcataggtacttcaggtgttgtattaaatgttgaataccaacgtgtgacctcatatgatagtaatttacacttattcaatcatagtgttccagatacttattacgcaatgggagtaacgttggcagcaggctatagtttaaactggttaaaacaaactttttttgaaaatgaatcttttgaagagattttaaatttagctgcatcttcaaagataggtgccaatggactactatttacaccttacttagctggagaacgtacgccacatggtgatgctcaaatacgtggaagttttataggtatcagtgggcaacatactaaagctgactttgcgagagcagtaatcgaaggcataacgtattctttatatgattctataaagattatgagacgagctggtcatgaaatgaactctatcacttcaatcggtggtggtgctaagagtagattttggttacaacttcaagctgatatttttaatgtgcaaataaaaagattgaagcatgaagaaggcccaagcatgggagcggcaattttagcggcatacggtctaggatggtttaaaacaattgagtcttgtgtagaggcatttattaaagtagacgaggtgtttgagccgaataatgaaaatcatgacctttatgaacaatactattcagtttatgaagctatatataaacaaacgaaacagcttactgctgatttgttaacgataacgaattaa

SEQ ID NO: 8951 - DNA, 924 bp, Staphylococcus epidermidis
atgaataaaaataaagtgattgtaattggatcaacaaatgtagataaatttcttaatgttaaaaggtttccaaaacccggtgagacattacatattaatcaagctcaaaaggagtttggtgggggcaagggagccaatcaagccatagcagctagtagattagcagcagatacaacatttatcagtaaagttggtaaagatggcaatgccaactttatattggaagatttcaaaaaagcaggtattcatacacaatatattttaacttcagaaagtgaagaaactgggcaagcatttatcactgttgatgaagcaggacaaaatacgattcttgtttacggtggtgcgaatatgacattaagtgcaactgatgttgagatgagtgcggatgcgtttattggtgcagactttgttgtagcgcagcttgaagttccatttgaggcgatagaacaagcatttaaaattgctcgtaaacaaaatatcactactgtattaaatcctgcaccggcaattgaattgcctaagtcacttttagagttaactgatataattattccaaacgaaacggaagcagaattattaacaggtatttcaatcaataatgaaagtgatatgaaagaaacagcaacatattttctcgatttaggtatatctgcagtattaattactttaggggagcaaggcacgtattgtgcatatcaagaacaatacaaaatgattcctgcgtgtaatgtaaaagcaatagatacgacagcagcaggagatacatttataggtgcttttttaagtgagttaaataaagatttgagtaatatagaatcggctattcgacttgcaaatcaagcgtcgtctctaacggtacaacgaaaaggagcacaagcttctataccaacacgtaaagaagtagaggcagaatataattaa

SEQ ID NO: 8952 - DNA, 405 bp, Staphylococcus epidermidis
atgaagaaaacagcagtattaaatagtcacatttcaagcgcaatctccacactaggtcactatgatttattaacgattaatgatgcgggtatgcctatacctaatgatgacaaacgtatagatttagcagtgactaagtcattgccacgtttcattgatgtgttggagacagtgttaactgaaatggaaatacaaaaagtatatttagcagaagaaattaaaactgcgaatgcacagcaattaaaagcaattaagaaattaatcaatgatgatgtagaaattaaatttattgcgcattctgagatgaaagaaatgttaaaatctcctttaaataaagggaatatacgtactggtgaaatcactcctttttctaacattatcctagaatctaatgtgactttttaa

SEQ ID NO: 8953 - DNA, 882 bp, Staphylococcus epidermidis
atggactttatagctattttaatcggattagggccactattaggctggggattatttccaactatcgcttctaagtttggtggacgtccagtcaatcaaatctttggtgctactgttggtactttgatcttcgcaattgttctagcactatttaaaggtataggtttaccaggaggtatggcattagtattttcgctcatatcaggtgcaggatgggcatttggtcaaattattacttttaaagcgttcgaattagtaggttcatcaagagcgatgccaattactactgcatttcaattacttggtgcatctttatggggcgtttttgcgcttggcaactggcccggtataacaaacaaaatcattggatttctagctttactcgtaattcttataggtgcacgtatgactgtatggactgaaacaaaacaacaagaatatagtaaaaatctacgaagtgcagtgctcttattacttgtaggtgaaattggctattggatatattctgctgcacctcaagcaacagatattggtggatttaaagcttttttacctcaagctatagggatggtcattgtggctgtcatctatgcgttgatgaatatgtctaaaggtaatgcttttaaagagaaagtaagttggcaacaaataatatccggatttttctttgcgtttgctgctttaacttatttaatttcagcacaacctaatatgaatggtttagcaacaggatttgttctatctcaaacatctgtagtattagcaacgctaacaggcatttttttcttaaatcagaaaaaaacatcaaaagaattaatgattacaattgtgggattagttcttattttagttgcagcatcaattacagtgtttattaaataa

SEQ ID NO: 8954 - DNA, 1605 bp, Staphylococcus epidermidis
atgaatatatataataaagtgacattatctgtcattttagttataacaattatcatttcgttcctcttttatttttatacaacagagaaaaaagtggacaaagataaattgtatgaaaacaaaattacaaatcataaacaagcaggtaaacctaaaaattatggtgtcgcatctaataataaaatagctacgaaagtcggaaataagattattgaagatggtggaaatgcggttgatgcggcaataggtgtttcttatgcactagcagtgacagaacctcattcatcaggactaggaggtggcggtgcgacacttacatataatggtaaagagaatgaaacgcctaaagcttatgaatataaaacaatgtcctcatatgaatataaagaaggcgacaaaattggagttcctggcttcgtgagaggattacatgatatgcacgcgaaagaaggaaaaatggatgagaaaaagattttagattacgttattccgcttgctaaagatggttttgaggtagattcagaactagaaagaagtttgaaattatatggtcgtgatattgatcacaactcaccattctataaaggaaataaaagtgttcgcgaaggagatattgtaaaacaagataaactcgctaatacattaactaaaatcaaagataaaggtcctgattacttctatgaagatattggtaaaagtgtttcaaaacaattagataataaattaactgaaagagatttcaaagaatttaaaacagaagaaaaagaagcggtaagtactgattataagaataatcaagtgtattcagcacctaatcctttaggaggcacattaatgcttcaaggattgaaaattgatgaaaaagaaaatgtagacaatatggatcgcaataattttatcacagcaatgattaaatcacgtgatgttatgtataagaatagagacattgttaatggtaatgagcctagtaatgaacaacatctgactgatgattatttacttggtgaacttaacaaagttaatattggtgaaaacacagataatggcagtgattttgatcaaattagaacggataatacaagtacaacccattttgtagttattgataagaatggtaagttagcaagtacgactaatacactatccagttactttgggacaggagactatatgaaagagggcttctatatgaataactctttaggcgactttagtaaggataaatcaagtcctaatcatggtgaacctcacaaggcgcctagatcatttatttctccgtcagtaattgttggccctaatttctatatgggtattggtacaccaggtgggaacaagattccaacaattcttaatgaagtgattgtcgattatttaaacagtgatggttcattacaagaatctattaataaaccaagattttataatgacggcggcacgatattttacgaaaatgctatgactgatgaagatataaatatctttaaaagtcttggttatggtgttgaagaaaagcataatgatccaaactttggcagtgtccaaggtgctgtttatgataaagataaaaatactgtagatgtcggtcatgatgtaggtaaccgttaa

SEQ ID NO: 8955 - DNA, 162 bp, Staphylococcus epidermidis
ttgaatattaaaaagcattggttacaaattgttgtagtcattcttgtagttgttatctttttattagttactttcgctagggcaaatgaaggtttagataattatgagcaacatgaattaaataatggtgaacagcaatatctttcaaaaggggcaagctaa

SEQ ID NO: 8956 - DNA, 1074 bp, Staphylococcus epidermidis
atgacaaagaaaaaacgtttatcgcctagtgagtggttgcttaaacaatctaaaagacataaaaggaaaaatacactttacacggcaattgtacttttagtagcgttagttctactcatatttgctgttaaatcaatacaagtagaacctgtaaaaagtgatacgagagacaaagatagcattcgtatcacctatttaggtaacgtcactttaaataaacatattcgacaaactaacttgaatgatgtttttaaaggtattcaagatactttagatcatagtgatttttcaacaggttcattaatagtaaatgatttttcacgaaatcaaaaagataacataaataaaaatattgaaaatatcatgtttctacgcaagcataatgttaaaagtgttaacttaatcaacgaatctatggataatattcaagcgacagcaatgatgagaaaaatagattcccaagcaggttataattttttaacaggtaatggttcaaatccaattaatagtaaaactgtacaacaagacattaaaggtaaaaaaatagctaatgtttcatttaccgatatcgaatctaactatactaactctttaaaaaacacgacgtcaattagtttagatccagatatattttatcctttaataaaaaaattaaaggaaaataatgattacgtcgtagtcaatgtagattgggggatacctaatgaacgaaatgtgactacacgtcaaaaagaatatgcacatgcgttagcgaatgctggtgcagatgtcattattggtcataatacagttattcaaaaagttgaaaattataagcgaacgcctattttttatagtttaggtaacacaacgtctgataacttcttatcaaaaaatcagaaaggaatgattgtacaacaagactggaaaggttcgcataatcagttccatatcacaccaattcaatcaaaagatggaaaaatctctaaagataatatgaataaaatggatcatattcgattcaaaaataacattaaagataaatcaattgatttaaaatctgatcaaaatggaggttatacttttgaatattaa

SEQ ID NO: 8957 - DNA, 453 bp, Staphylococcus epidermidis
atgataggttcagaattatatttctccttattcgtaggtgtcgtactcagtttgatatttgctgagaaatttgggattaatccagcagggttagtcgttccaggttatttagctttgatttttgatcaaccgatcatgttgttatcagtattaatcattagttgcttaacttattttatcgtaagcaacggtattagtaagtgggttattttatatggtagaagaaaattcgctgccatgatactgacaggaatggtgattaaatttatatttgatctcttgtacccattgaccccatttgaaatggttgaagtttcaggtataggtgttgtcattcctggtattattgcgaatacaattcaaaaacaaggtgtagtcattacactttctacaacaatgttattaacatgtattacatatatcatcttatttttatatagttttattaattaa

SEQ ID NO: 8958 - DNA, 1158 bp, Staphylococcus epidermidis
ttgttactcattatagcgtgtgttgcgcttattctctggctaggaattaaagagaagaagcgtcatgcaaatcgacttgaaaaaattccattacgtattaacataaatggaattcgtgggaaatctacgattactcggatggcttacagtgttctacgtgaggataagtatagagttattggtaagacaacaggaacagatgcacgaatgctttattggtttactgaaaaggaatatccagtaatcagaaaaccacaaggcgccaacattggagaacaacgagatattattcgtaaggtggttaaacaaaaagcaaatgccctagttaatgagtgtatggctgtaaatccagattatcaaattacctttcaaaatgatttagtaaaagcaaatatcggtgtaattgttaatgtgatggaagaccatatggatgtcttaggaccgacacttaaagatgtagcgcaagcttttactgcaacaattccatataacgggaaattagttgtaatgaaagataactatactagtttctttgcaaaggaagctaaaaagcgtaattcagaactcattgttgtagataaagacgtcataccagaatcatatttacggaagttcgattatttagtatttcctgataatgtagctattgtgttaggaatagcgcaagcagttggtgtagatgaagaaactgcattacaaggtatgttaaatgcaccagccgatccaggtgctgttagaattaaatatttccatgcaaatcgcacaaaaaatgtatttgttaatgcattcgctgctaatgaaccgcagtctacaaaagcgattttgaataaagtggaatcatataattatccatacgataagaaaataatcattctcaattgtcgttcagatagggttgatagaacacaactgtttgttgataactttttaggtgaagtcgattacgatgttctcatttgtacaggaaaaagtacacaaatggtgacacagtttatggaaacaatgccagaaaaaacatatatcaattatgaaggacgagactttgtagagattgaaaaaggtattctacatgaagctgagaatgcacttgtattttgtgtaggaaacatccacggcccgggtggtagaatagcggaattcatagaagggatagaataa

SEQ ID NO: 8959 - DNA, 318 bp, Staphylococcus epidermidis
atggagaagtcagttaaacttgctgttggcatctatctagcaattattttaattatttgtagtatttacctcgcatttatacttattggaagtttaagtggtaaagacatgagtaattctgttctagatactgatcactctcgtatcaacaatacttcaagaaacagtaacgaagatgttacgtcatcaaataatgagtcaaacaatacaaaagcacactcattttcaaactctgaatataaagctgtaaatataaacgaagcatataaaaataataaacatattaaaaaagcgaattcgagttatcaatactattga

SEQ ID NO: 8960 - DNA, 981 bp, Staphylococcus epidermidis
atgtttaaaaagattgctactatactaggttcgacattatttggtacagttttattcgcaaaagtgaaagaaaagcgtagttataaaagttttttacaagagaaaatgattagaatatcaggaatgaaaaagacatttgaaagtatagatgacgcgaaaaaagctttgaatgagactaaatatcaaactgcaggtaaatataatggaacaacatatgaatttaagcataaagttcaaataagagattattatggttctttagtctatgttgttaatgatcatggtcttccagatcaacgcacggtcttatatgtacatggaggcgcatggttccaagatcctttggaaaatcattttgaatatttagacttactcgttgatgcgctcgatgctagggtgattatgcccgtatatcctaaaataccacacagagattatcgtacgacatttgaattattaacaaaaatatataagcgattactgactaaaattgatgaacctgaaaacttggtcatcattggagattcagccgggggacaaattgcattagcttttgcacaaatgttaaaaaaagagcaactgagtcaacctggccatattgttcttatttcaccggtgcttgatgcgacatttaagaatccagaagcaagaaaatatgaaaaagaagatccaatgcttggaattgatggcagtaaatatcttgtagagttatgggctggtgatgcaccactagatgactataagatgtctccaatgaatggtgatttagaaggcctaggacatattacacttactgtaggaaccaaagaaacattatatcctgatgcagttaagttctctcacatgttaaatgataaaggaataaagcatcagtttatcccaggttacaatttatttcatatttatcccttattccctatcccagaacgccaacgctttttagaacagcttaaaaaaatcattgtcacaaaagagttataa

SEQ ID NO: 8961 - DNA, 849 bp, Staphylococcus epidermidis
atgaagaagcaacaaaataaagtccatatgattaatatatctttatgccttatagggacattacttattgcaatcgcagtaaatagttttgttataccgggcaatttaggtgagggtggttctataggcctttcattaattctgaattatactctaggtatttcacccgcactcagttccttcatcattaacgcaatattaattattgtaggttggaaatttctcagtagaacgacagcgatttacactgctataacaatcaccgcaagttcaatttttcttgatttaactcacacattcggattaggtattcatgataattttattaattcaatttttgcaggtttaatgttgggaatcggttctgggttagtaattactgctcatagtacattgggtggtacatctgtcattgcacgtatcatttcaaaatatagtgagatgaagacgtcacaagcactacttatattagatgcaatcatcgtgttatcatttatcgttgttttacctataacgaatgtattatatactattgtgatgctatttattgttgaaaaatcaatgtcttttgttgttgaaggatttaatcctaaaaaagctgtgacagttatttcaaaatataataaagaaatcagtgctgatatatatgaaatgactggaagaggggcaaccttattaagtggtaaaggtgcttaccaaaaaagtgatacagaagttctatatgccgtggtatcccaaaatcaagttggagcaataaaaaagattgttaatcaatatgatgaaaatgcctttttagtgattcatgatgtgcgtgatgtcttaggtaatggatttattaatattaaataa

SEQ ID NO: 8962 - DNA, 327 bp, Staphylococcus epidermidis; identical to SEQ ID NO: 5759

SEQ ID NO: 8963 - DNA, 1053 bp, Staphylococcus epidermidis
atgaaagcttatgaatacttaaaacctggtcatgcacaacttacggataaagagaagccaaccattacgagcagtactgacgctattattcgcatagttaagacgacaatatgtggtacagatcttcatatcataaaaggagatacacctgaagttaaatcacatacgacactaggtcacgaaggtattggaatcattgaagaaattggtgacaacgttaacaacttcaaagttggagataaagtgattatctcttgcatttcatcatgtggcaaatgctactattgcaaaaaaggtatctatgcacattgtgaaaacggaggaggatggatattaggacatttagtgaatggtactcaagcagaatatgttaaagttccttttgcagataattctttatatcacgccccttcaaatttaaaagaagacgcccttgtaatgttatcagatatacttccaacaggttatgaaattggtgttttaaaaggtaaagttaaacctggctgtacagtagccattgtaggtgctggtcctgtaggtttagcagcattacttacagcacaattctattcaccttcaaaaattattatgattgatttagatgataatagattagaaaccgctaaagaaataggtgctacgcatttaattaactctaaagagactgaaaccgcaattaaaaaggtaaaatcgttaaatccacgtggtgttgatgttgctattgaagctgtcggaattccacaaacctttgatttatgtcaaaatttaattggtgtcgatggtacgattgctaatgttggtgtgcatgggttacctgtacaacttgatatagataaattatggattaaaaatattaacgtaactactggtttagtttcaggaaatacaactgaagaattacttgaagcgttaaaaagcaaaataatacaaccagaacaactcgtgacacattatagtaaactgagtgaaatcgaaagtgcctatgatttatttagaaatgcaacagatcataaagcgattaaattaatcatagagaatgatatcacaatttaa

SEQ ID NO: 8964 - DNA, 768 bp, Staphylococcus epidermidis
atggtaatcatggatgacttgaaacaaaatcaatcttctaacgaaaaacctaaaggtaataaaataattaatattttgatattcatcggaatgattttattaattcaaatacctattggcgtgtcactaatagctttacctttttcagtgaaattcagtaagttaacatccatcgcattaagtatgctaataactggtacagcactattaatcatatggttagttaggaattattatttgagtcatacatatgaaagacaatatcaatcaatgaggggaaaagatatctttattaatattggttttctggtattatcaatggtttttagtattctaagtagtgtattaatggtcatatttactggcaacgatactacagcgaatgagaaagaaatcaatgaaagtttagatttacttttacaaaaagaccatttaccacatatttcaattgttgcaactgttgttttaatgatatgtattataggtccgtatttagaggaattactcttccgaggaatttttaaagaaacattatttatgaaatatcgattttggctaccattcattatatcttctattatttttagttcacaacatttatcaacaaatatattttcatatgcaatttattttctaatgggttgtgtattataccttgcctataacagaagacgtaatatcaaagatagtatgatggttcacatgttgaataattctgtttcaacattaccggtatttgttggttatttatggctatattttagatag

SEQ ID NO: 8965 - DNA, 2028 bp, Staphylococcus epidermidis
atgtttaaaaagctatttggtcaaatgcaacgtatcggtaaagctttaatgttaccagttgcgattttaccggctgcagggttgctattagcaattgggactgcgtttcaaggcgaagcgttacaacattatcttccatttataaaaaatgatattgttcaacaaatcgctaatatgcttacaggtgctggtggtattatatttgataatctacctattatctttgctttaggtgtagcaattggtcttgcaggtggagatggtgtagctgctattgctgcatttgttggttttatcattttaaataaaacaatgggggctttcttgcatgtaactccagataaattatctgatccaactaatggatatgcaaatgtattagggattcctacacttcaaacaggtgtgttcggaggtattattattggtgcactagcagcctggtgttataacaaattctataatattaccttaccatcatatttaggattctttgcaggtaaacgttttgtaccaattatgatggcaacaacatctttcattttagcctttccgatggcaattatttggccaacgattcaaaacggtttaaatgcatttagtgaggggttattagattcaaatacaggtttagctgtatttttatttggatttattaagcgattattaataccatttggtttacatcacattttccatgcaccattctggtttgaatttggttcttggaaaaatgctgctggagagataattagaggcgaccaacgtatttttattgaacaaatccgtgaaggtgctcatttaacttctggtaaattcatgcaaggggaattcccagtcatgatgtttggattaccagctgcagcattggctatttatcaaacagcaaaacctgagaataagaaagtagttgcaggtttaatgatttctgctgcattaacatcatttttaactggtattactgaaccattagaattctcattcttatttgtagcaccattcttattcgtaattcacgcagtattagatggtttatcattcttgacactatacttgttaaatgtacatttaggatatactttctctggaggatttatagattatgttttattaggtattctacctaataaaacagcatggtggcttgtcatcccagtaggtattatttatgcagtgatttactactttgtatttagattccttattgttaaatttaactataaaacaccaggtcgtgaagataaaaaatcatctgtaacaactacatcggctagtcaactgccattcgatgttttgaaagcaatgggtggtaaagaaaatattaaacatctagatgcttgtattactagactaagagtagaagtaaatgaaaaatcaaaagttgatgttgccggccttaaatcattaggtgcttcaggagtacttgaagtcggtaacaatatgcaagctattttcggtcctaaatctgatcaaatcaaacatgatatggctaagataataagtggagaaattacaaaaccaagtgaaacaacaattgatgaagaagtgtcagatgatcctgtacatgtggaagatattgtagaaacagaaatttacgcaccaggacatggtgagataataccgttatctgaagtacctgataaagttttctctgaaaagatgatgggtgatggtatcggatttgtaccagattcaggagaaattgtagcaccatttgatggtacagttaaaacaattttccctacaaaacatgcgataggattggagtctgatagtggtgttgaagtgttaattcacattggtatcgatacagttaaattaaatggtgaaggttttgaaagtttggtaaatactgatgaaccagtaacacaaggtcaaccattaatgaagattgatttagaatacttaaaggaacatgctccaagtattattacaccagtaatcataacaaaccaagaagacaaaacattaacaattgaagatgtaaaacaagtcgatcctggtaaagcgattatgacaattaaataa

SEQ ID NO: 8966 - DNA, 1740 bp, Staphylococcus epidermidis
atggcacaaattaaagcaaatgaagcattagttaaggcattacaaacctggaatattgatcatttatatggtattcctggcgactcagtagatgctgttgttgatagcttacgtacggtcagagatcaatttaaattctatcacgtacgtcatgaagaggtagcgagtttagctgctgcaagttacacaaaaatgacagggaaaattggtgtagctttaagtatcggaggacctggtattgtacacttattaaatggtatgtacgatgctaaaatggataatgtacctcaacttattattgctggacaaacaaatagtacattattaggtacaaaattcttccaagagacaaacatttctaaaatggttgatgatgttgctgtatatcaccaccaaattcaaaaaggtgataacgtatttgaaattacaaatgaagcaattcgtacggcatacgagaaaaaaggtgtctctgttatcatttgtccaaatgacttattaactcaaaaaattaaagacactacaaatcgtgcagttgatacaactaaaccaaaaccagcttcaccaaaattcaaaagtattaaaaaagcagctaaattaattgataaagctaaaaaaccagtaatgcttattggtttaggtacacaacacgctaaagatgaattacgtgaatttattgaagctgcaaaaattccagttattcacacattacctgcaaaaacaatcttacctgacgatcatccttatagtattggtaacttaggtaaaattggtactaaaacatcttatcaaacaattcaagatgcagacttattaattatggctggtacgaactatccgtatgttaactatttacctaagaaaaacattaaagctattcaaatcgatacgaacgaagaaaatattggtgcacgctttaaaattaatgtaggtattttaggtgatagtaaagttgctttccatcaactaactgaaaacattaagcatgttgcaaaacgtccattcttagataagacattagaacgtaaagcagtttgggataaatggatgaaacaagatttgaataatgacaattcaccattacgtccagaacgtttaatgaaagcaatcaatgctaacttaaaagatgatgcaattatctcagcagatgttggtacttctacagtatggtctacgcgttacttaaacttatctgtaaataataaattcattatttctagttggttaggtactatgggctgtggtttaccaggtgcgatggcagctaaaattgcttatccaaaccgtcaagcagtagctatcacaggtgacggtgcgttccaaatggtaatgcaagactttgctacagctgttcaatataacttaccaatgacaatcttcgtattaaataacaaacaattgtcattcattaaatatgaacaacaagctgctggtgaattagagtatgccattgatttctctgatatggatcatgctaaatttgctgaagctgctggtggtaaaggctatgttgtgagagatgtaagtcgtcttgacgacatcgttgaagaggcaatggctcaagatgttccaacaatcgttgatgttcatgttgatcctaatgctgcaccattaccaggtaaaattgtaaacgaagaagcatttggttacagtaaatgggcttatagatcaattactgaagataaaaacttagactttgatcaaatcccaccaatctctgtagcagctaaacgtttcttataa

SEQ ID NO: 8967 - DNA, 690 bp, Staphylococcus epidermidis
atgaatgaatacttacaagcagttctaatgattttgttaactattgttctgtactatgtttccaaaaagattcaagataaatacaataatccactattaaatccagctcttattgcatcaattgcaataattattgttttattggtttgcggagtaagctataaggggtatatgaaaggtggtacctggattaaccatgttttaaacgctacagttgtatgtcttgcatacccactttatcaaaataaaaagaaaataaaaaaatatttaacaattattttcacaagcgtgttgactggtgtagttctcaattttgtgttagtatttacaacgttgaaaatctttggttattctaaagacacaattgttaccctgttacctagatcaattacagcagcagtaggtatagaggtttctcaagaattgggaggaacagatacaattactgtgctctttatcataactacaggtttaatcggcagtattttaggttcaatgcttttacgtatgggaggttttaaatcttccattgcgcgaggactaacttatgggaatgcttctcacgcatttggtaccgcaaaagcattagagcttgatattgaatcaggagcgttcagttcaattggtatgattttaacagcagtcattagttctgttctcataccagtactgattttattgttttactaa

SEQ ID NO: 8968 - DNA, 393 bp, Staphylococcus epidermidis; identical to SEQ ID NO: 5765

SEQ ID NO: 8969 - DNA, 885 bp, Staphylococcus epidermidis; identical to SEQ ID NO: 5766

SEQ ID NO: 8970 - DNA, 216 bp, Staphylococcus epidermidis
ttgagcttttacgaatttatgcaaaatttcctaggtgatgacacgccattaggtgaattggttgattggattaatcaagatatcaatttccctaaagacgtgacgagccaaaaagaaatcttgacatattttcgaaatcatccatgtccggaaaacataccagtgacgagtatcaaacgggcactagctgttttcaaccaattcactaaagtataa

SEQ ID NO: 8971 - DNA, 432 bp, Staphylococcus epidermidis
atgaaattcaaaaaattattatctcgtattattatcgctacaatgattacatttactggaacactctcatatcaagctattgaacaaacgcatatttcccatgctgcacataattattatggtaaaaaacaatgcacttggtgggcatttaaacgtcgtgctcaattaggtaaacctgtatcaaatcgatggggtaatgctaagaattggtatagcaatgcacgtcgatctggttatgcaactggacataagcctcgaaaatacgctgttatgcaatcaacgagaggctattatgggcacgtagcagtggttgaaaaagtatataagaatggaaaaatcaaaatttctgaatataattataatgtgccattaggctacggcacacgcattattagtaaatcgtctgcacgaaactataattatatttattaa

SEQ ID NO: 8972 - DNA, 1278 bp, Staphylococcus epidermidis
atgaaaagtttagataaaggatttagacatttaacacgaaaagataaattaaaaaaacttgttgaatacggttggctagatgatgaaaactatgaaatattacttaatcatccgttaattaatgaggaagtcgcaaacagtttaattgaaaatgtcattggtcaaggtgcactaccagtagggttattacctcgaattatagttgatgataaagaatatgtagtacctatgatggtagaggaaccttctgtcgtagcagcagcaagttatggcgcaaaactcgttaatcaaagtggtggatttaagacaatttcaagtgaacgtctaatgattggacaaattgtctttgatgatgttgaagacacaggcacattagctaactcaatatatcaaatagaatcacaaattcatcaaatcgctgatgaagcttacccttctattaaagcaagaggtggaggatatcaacgtattgaaatagatacattccctaatcatcgattattatctttgaaggtttttgttgatactaaagatgctatgggtgctaatatgttaaatacaatattagaagcaatcactgcacatctaaaagttaaattttcaaatcaaaatgttttaatgagtattttatctaatcatgcgacagcatcagtagtaaaagtacaaggggaaatagatattgaagatttacatagaggagagagaagtggcgaagaggtagcacaacgtatggaacgagcgtcagttcttgcacaagtagatatacatcgtgctgcaacacataacaaaggtgtgatgaatggtatacacgctgtagtattggctacaggcaatgatacaagaggagttgaagcaagtgctcatgcatatgcaagcaaagatggtcattatagagggatagctacttgggaatatgatcgctcacgtaataaattggttggaactattgaagttcctatgactttagcgacagtaggtggaggtacgaaagttttacctattgctaaagcctcattaaatttgcttaatgttgaaaatgcacaggaactagggcaagttgttgctgctgttggattagcacaaaatttctctgcatgtagagcgctagtgtctgaggggatacaacaaggacatatgagtttacaatataaatcattagcgattgttgtaggtgcaaaaggcgaagaaattgcgcaagtagctgaagcgctcaaatatgaatcacaagctaatactgccaaagctcaagaaatcttgatgaatataagaaagtcataa

SEQ ID NO: 8973 - DNA, 1167 bp, Staphylococcus epidermidis
atgaatataggtatagataaaataagtttctatgtacccaaatattatgtagacatggctaaacttgcagaagcgcgccaagtcgatcctaataaatttttaattggaattggtcaaactgaaatgactgtgagcccagtgaatcaagatatcgtatctatgggagccaatgctgctaaagatattataacagaagaagataaaaagaatattggtatggttatagtagcaactgagtctgcgattgataatgccaaagcagcagccgttcaaattcaccatcttttaggtattcaaccctttgcaagatgctttgaaatgaaagaggcttgttatgcagcaacacctgcaattcaacttgccaaagattatcttgctcaacgccctaacgaaaaggttcttgtcattgctagtgacacagctcgttatggtattcattctggtggtgagcctactcaaggtgccggtgcagttgcaatgatgatttcacataacccaagtattttaaaacttaatgatgatgccgtagcatatactgaagacgtttatgatttctggcgtccaacgggtcatcaatatcccttagttgctggtgcattgtcgaaagatgcctatatcaagtcattccaagaaagttggaatgactatgcacgtcgccataataaaacactcgctgatttcgcttcactatgtttccatgtaccattcaccaaaatgggacaaaaagctttagattctattattaatcatgccgatgaaactacacaagaccgtcttaactctagttaccaagatgcagttgattataatcgttatgtcggtaatatttacacagggtccttatatttaagtctcatctctttattagaaacacgtgatttaaaaggcggacaaacgattggtctctttagttatggttctggttctgtaggcgagttctttagtggaacattagtagatggattcaaggagcaattagatgttgagcgccacaaatctttattaaataatagaatagaggtttctgttgatgaatatgaacatttcttcaaacgctttgaccaattagaattgaatcatgaacttgaaaaatcaaatgcagatcgtgacattttctatttaaaatctattgataacaatattcgtgaatatcatatagcagaataa

SEQ ID NO: 8974 - DNA, 519 bp, Staphylococcus epidermidis
atgtatcaatcaatgtatgactcgcccgttggcttattgcaattaattacaaacgatggcatctcgttgtcacatgtcttataccctaatcaacatttgaaaggaattaaaacaaaggatacgttagatgtttttaaagatactaaagcgtggttaagagagtattttaaagggaattatcctgagataaaagtaccgttagcaccaaaaggcactgattttcaacagaaggtatggaatgaacttcagacaattcgttatagagaacttaaaacatatggagagattgctaaaacagtaggacgagcaatgaataagccagcaatgtctgctcaggctgtaggaggtgctgttgggagtaatcctatttctatacttataccatgtcatcgagtggttggtaaagatggaaatttaacaggatacggaggtactttagacaacaaaataaaattattaaaattggaagaaatagatatgacacatttatacagacctaaaaaaacaacgaaaccttga

SEQ ID NO: 8975 - DNA, 465 bp, Staphylococcus epidermidis
atgaagggtagcaaaaaattaaatgagttactagaagataatcagaagaaactaaaaaaattatttaagtacgatcataaaaaggctttggcgtttacaccagaggatagagaaaaagttaaggataagtttggtgtctatgtgattttcgatgagaaaaaaccagtgtttgtaggtcaaactggaggatattcatccacacatcaacctataaatagtgatttgtatacaaaattaggacaatacaattcacgttcagaaacaggtacaactaaatttagaaaagcttatgctcaaaataaggacttaaatccaaatcatttaaaagacattactgcagataaatacggcctcacttttcaatatataaaagtaaaagacgaacctgcgttcattaatgttttagaaattctcgcattagaatatgcaaaaaataaagggtatgaactttataattttcaataa

SEQ ID NO: 8976 - DNA, 183 bp, Staphylococcus epidermidis
atgtttattttagtcaatacaatattgttcatagcgatttttggttatacagcaatgacattagtaaaattctttaaacgttcaaaagaaggtgattgtggtgggtgtaaatctaattgcaaatgcgatacgaatacttcatctcataaaaataaattaaatattccacatattaagtcatag

SEQ ID NO: 8977 - DNA, 1995 bp, Staphylococcus epidermidis
atgactcaaagctactgtattcttggaaaccctaatgtaggcaaaacatcattatttaatgcgttaaccggttcttacgaatatataggtaactggagtggcgtaaccgttgaaaagaaagtaggaaaattgaaagataatgtaggtgatttagttgatttaccgggcatttatgatttatcacctatttctaaagatgagacggttgtcacagattatttaatgtcaacgtcattcacaggaatgattaacattattgacgcatgtcagcttaaaagaaatcttaatcttacaatacagttgatggaactcaacaaacctatgattattggtttaaatatgatagatgttgcaacacaaagaggtattaaaattaactatcaagctttgatgagaaaattaaaagtaccggtatttccaattgttgctagaaaggcaaaggggacacatagtcttttaggagagcttaattatttagaaccacatcaacgtcgtgcatttaagattaattatgggactgaaattgaaactgcaattcaacaaatttgttcaattatcaaacaggataatatgtatccaacagaacgtttacgttttatagccatacagtatttaatagacaatgttcaaatttatcaagaactcgatgccatgattttagaacagttagaacccattaagcgaaagttaagtaacgcgacagaacaatcaacacgccaaagaattgaagctgtgcgaaatgattacattaatcagctattggaagatatcgtagaatatcccgaagaggataaacaattctttacttcaaaagtggatcgattattattaaatagatatctaggtatacctatatttttaggtattatgtggcttatttttcaaacaacctttacatggataggaacaccattatctgatcaattagacgcttttataagtggtcctttatcagaatggattaaatctgttatgaatacattacatattacgtcgtttcttcaagatcttattacagatggtattatcgctggtgtgggttctgtattggtatttgtaccacaaattgttgtgttattcttttttatttctttattagaagattcaggttatatggcaagaatagctgtattaatggataaaacaatggaatctataggtttaagtggaaaatcatttattcctatgattattggatttggatgcaatgtaccaagtattatggcagcaagaagtatagagaatgagaaagaacgtttgattacaatattggttgcacccttcatgtcatgttcagcacgcttaccggtttatgcactttttgtaggagcgttcttttcagcacatcaatcactagttgtattaagcttatatattttaggtatagttgtcgctttactagtaagtacgttattgaataaattgatattaaaagataatcagtctgtttttattgtggagttaccgacataccgtgttccatcatttaaaacactttggcgcagtacttgggaaaaagcaaaaggttttgtcaaaaaagcaggtacctttatttttggtggttcagtcgttatttggacactcacatacatcggtccgcacggtgttaatgtcccgattaatcaaagttttatgcatatgattggtcaagggttcgcgaatttaattgcacctttaggatttggctcttggcaggcaggagcaactttaatacctggctttcttgctaaagaagtgattatcagttctatggctattttatactcttctagcgaaagtggtttaacacaagtcattcaacagcaattcaccccactttcagcttatgcattcatgatttttattttactttacgttccttgtatttcaacagtcgctacgattcgtaaagagacaagttcttggaaatggacattactagcggttgtttatccaatagtaacagcatatatattaacgttcgtattctatcaagttagtcaattatttatataa

SEQ ID NO: 8978 - DNA, 228 bp, Staphylococcus epidermidis; identical to SEQ ID NO: 5775

SEQ ID NO: 8979 - DNA, 1545 bp, Staphylococcus epidermidis
atggtagtacctttcaaaaatgaacctggtattgatttttcagtacagacaaatgttgagcgttttaatgaagaattaaggaaagtaaaagcgcaactaggacaagatataccacttgtgattaacggagaaaaacttactaaaactgatacttttaattcagtgaatcctgcgaatacatcacagctcattgcgaaagtgtctaaagcaacgcaagatgatattgaaaaagctttcgaatcagcaaatcatgcgtatcaatcatggaagaagtggtcgcataaggaccgtgcagaattactgttacgtgtagccgcaattatccgtcgtcgaaaagaggaaatttccgctattatggtttatgaagccggcaagccttgggatgaagcagttggagatgcagctgagggtattgattttatagaatattatgcaagatcaatgatggaacttgcagatggtaagccagtattagacagagaaggtgaacataatcgctatttttataaacctattggtacaggcgtgacaattccaccatggaattttccatttgcaattatggctggtacaaccttagcccctgttgttgcaggtaacactgtattattaaagcctgctgaggatacagttttgactgcttataaattaatggaaatattagaagaagcaggtttaccccaaggtgttgtaaattttgttcctggtgatccaaaagaaattggagattatttagtcgaccataaagatacacattttgtcacatttacaggatcccgagctacaggtacacgtatttatgaacgtagtgctgtagtgcaagaaggacaacagtttttaaaacgtgttattgcagagatgggtggcaaagatgcgatagttgtagataataatgtagatacagatttagcggctgaagcaattgttacatctgcttttggtttctctggtcaaaaatgctctgcgtgttctcgtgccatagtccatcaagacgtacatgatgaaatattggaaaaagcaattcaattaactcaaaaattaactttaggtaatactgaagagaacacatttatggggccagtaattaatcaaaaacaatttgataaaatcaaaaattatattgaaattggtaaaaaagaaggcaaactagagactggtggtggaacagatgattctaccggttatttcattgaaccaacgattttctccggactacaatctgcggatcgtatcatgcaagaagaaatttttggaccagtcgtaggctttattaaggtcaaggattttgatgaggctattgaagtagctaatgatactgactatggtttgacaggcgctgtaattactaatcatcgtgaacattggattaaggctgtgaatgaatttgatgtaggtaacctttacttgaatagaggttgtacagctgcagtagtgggttatcatccatttggtggattcaagatgtctggtacagatgctaaaacaggaagtccagattacttacttaatttcttagaacaaaaagttgtttctgaaatgttttaa

SEQ ID NO: 8980 - DNA, 870 bp, Staphylococcus epidermidis
gtgaatttattaaaatttcacaacaaaatcaaaggatatactcaaaatagacaaccaggtattgaagcggatatggaacctaaacccattgcagaattagaagaatataaagcagcaggaaagttagagaataaagttgctctaataacaggaggagattcaggtattggacgtgcgatagcaatactatatgctaaagaaggggcaaatgttgctattggttattatgacgaacatcaagatgccgaagacacagttaatcgacttcaagaaatgggtgtaaaagctaaagcttatgctcatgacttaaaagatgaaaagcaatctcaaaagttaatcaaagatgtcataaatgacttcggtagtttaaatatattagtaaataatgggggcgtgcaatttccacgcgatcattttgaagatatcactccacaacaagtgaaagaaacttttatgacgaatatttttggtatgatgtttttatcccaggcagcagtaccttacctatctgaaggagatacaattataaacactacaagtgtcacagcatatagaggatcggggcatctcattgattattcagctacaaaaggtgccatagtatcgtttacccgttctcttgctactactttaatggaaaagggaattcgcgttaacgccgttgcgcccggcccaatctattcacctttaattcctgcgacatttgatgaagaaaaagtagaacatcaaggtgacgaaacgccgatgggtcgtcgtggacaaccagcagaacttgcaccttcttatgtcttcttagcaacacatgcagatagttcctatattactggtcaagtcattcatgtcaatggtggcgattttatcacatcttaa

SEQ ID NO: 8981 - DNA, 207 bp, Staphylococcus epidermidis
atgagaaaaatacttaagggtattatattatcattaataatcatcggcttaatcaaaacgttcaatgaatatgatattatacattgtgcaaatcattatttcgaacaaatcaaaagtggaaaaataattgaagatatcaaaatcgatcatttcaataattatcataatattaattttgaagatctaaatccttctgactttttttaa

SEQ ID NO: 8982 - DNA, 2385 bp, Staphylococcus epidermidis
atggcgaatacaacgttgactttggatattattggtatgacatgtgctgcgtgctcaaatcgtattgaaaagaaattgaatcgtatgaatcatgttcaagctaaagtgaatctgactactgaaaaagcaactatcgactatgagtctgacgattatcatctcgaagattttgtagagcaaattcaaagtctcggctatgatgttgcagttgagcaagtagaattaaatataaatggtatgacatgtgcagcatgttctaatcgtatagaaaaggttctaaatcaaacgcaaggtgtacaacaggcaacagtaaacttaactaccgaacaagcactcatcaaatattaccctagtgctacgaacacggaagcattaattaaacgtattcaaaatattgggtacgatgctgaaactaaaacttcatcaaaagcgcaatcaaatcgtaaaaaacaagagttaaaacataaacgcaataaattaatcatttcagctattttatcgttgccactattattagtaatggtggtgcatatctcaccaatttccattccatccattttggtcaatccttgggtacaattaattctttcaacacctgtccaatttattattggttggcaattttacgttggcgcgtataaaaatttgcgaaatggttcagctaacatggatgtattggttgctgttggtaccagtgccgcatatttttatagcatttatgaaatgatgatgtggctcacacatcaaacacatcacccacatttatattttgaaacaagtgctattttaattacgttaattcttcttggtaaatatttagaagcacgtgccaaatcacagactaccaatgcattaagcgaattgttaaatttacaagcgaaagaagcacgagtaattaaagaaaataaagaaattatgcttccacttgataaagttaaagtcggagatactttactaataaaacctggcgaaaagatacctgtagatggcaaagtcactaaaggtgatacttccattgacgaatccatgctaactggtgagtctatacctgttgaaaaaagtagtggcgattcagtgattggatctaccatgaataaaaatggttcaatcatgattgaagcaactcaagtaggtggtgatactgcattatcacatataattaaagtggttgaggatgctcaaagttctaaagcaccgattcaacgcttagctgatattatttctggatattttgttccgattgtagttagcattgcggttattacttttatcatatggattatattcgttcaccccggacaatttgaacctgcacttgtttcagcaatatctgttttagttattgcttgcccctgtgcacttggtttagcaacgcctacatctattatggtaggtacaggacgtgctgcagaaaatggcatattattcaaaggaggccaatttgtagaacgtgcacattatgttgatacaatcgtgctagataaaacaggcacaattactaatggtcaacctgtagtaactgattatgttggtgacaatgatacattacaacttttagcaagtgctgaaaatacttcagaacatcctcttgctgatgccattgttacttatgctaaagataaaggtcttaatttacttgataatgacacttttaaatcaattccgggacatggcattaaagctacgattcatcaacaacaaatccttgtgggcaatcgaaaattaatgaatgattacaatatatctattagtaataaattaaatgaacaattaaatcactatgaatatttaggtcaaacggcaatgatgattgccgtggataatcaaattaatggaatcattgctgttgctgatacagtaaaaaatgatgctaaacaagcgataaaagaactaagaaatatgaatatcgacgtggttatgctgactggtgataacaatcgaacagctcaaaccatcgccaaacaagttggcattgaacatgtaattgcagaagtgttgcccgaagaaaaggcacatcaaatctctttattacaagacaaaggtaaacaggttgccatggtcggtgatggaattaatgatgcgcctgcacttgtaaaagccgatattggaatggctataggcactggagctgaggtagcgattgaagctgcagatattacgattcttggtggtgacttgctattagttccaaaagctatcaaagcaagtaaagctacgattaaaaatattcgacaaaatttattttgggcatttggatataacgtagctggcatcccaatagctgcttgtggtttattagcaccttggattgctggtgctgctatggcattaagttctgttagcgtagttatgaatgcattaagactgaaaaaaatgaaactatag

SEQ ID NO: 8983 - DNA, 207 bp, Staphylococcus epidermidis; identical to SEQ ID NO: 5780

SEQ ID NO: 8984 - DNA, 999 bp, Staphylococcus epidermidis
atgactaaaattaaattaatgggtgtcagagaagaagatgaacattatattgaaatgtggtcacaacaacatgaagtggaagtggatatgtcgaaagaacagttaactgaagacaatgtccaatctattgaaggatttgatggactatcattgtctcaaacattaccattatcagaaacaatttataataaattaaatcaacttggaattcggcagatcgctcaacgaagtgctggatttgatggttatgatttagagttagcatctaaatatggtcttattatatctaatgtgccttcctattcacctcgaagcattgctgagtttaccgtgactcaagccatcaatattgtacgtcactttaatcatattcaaagaaaaatgagattgcacgattttaggtgggaagcatcaattttatctcaatcgatcaaagatttaaaggtagcggttattggcacgggacatattggtggcattgttgcacaaatattctcagaaggatatctatgtgacgttgtagcgtatgatccttttccaagtgaacatgtgaaaccttacgttacctataaacaatgtataaatgaggctattaaagatgcagatattgtcacaatacatatgccgtcaacacgatataacaattacctgtttaatgaaaatatatttcaaatgtttaaaaaaggggttgtgtttgtaaattgtgctagaggatccttagtagataccaaggctttgttatctgcaatagagcaaggtcaaattaaaggtgcagcacttgatacttatgaatatgaagttggagtatatacgacagatagaagtgaacaaggtttgaatgacccacttttagaggaattaattactagagaagatattattgttacaccgcacatagcattttatactgaagaggcaatcaaacatcttatttttgatgctttagatgcaacaatggaagtattaaatactggcacgacggagttaagagtaaattaa

SEQ ID NO: 8985 - DNA, 1161 bp, Staphylococcus epidermidis
atggaaatgtcagaaaggctagcttcaattcctgatagctactttggcaaaacaatgggccgtatagttgaacatggtcctttaccacttataaatatggcagttggaattccagatggagaaacgccaaagggtattatcaatcatttttcagaggcgctatgtattccagaaaatcaaaagtatggtccatttcacggcaaagatgcctttaaacaagctattgttaacttctaccaaagacattacgatgttgaattagacaaagaagatgaagtttgtattttatatgggactaaaaatggtcttgttgcattacctacttgtgttgttaatcctggtgaaattgtacttttacctgatccgggatatacagattatttagcgggggtcatgttagctgatgctaagccactccctttaaaattgtcgccaccaaattatttgccgaattggaatactataagtgctaaagttcttgagaagactaagctaatttatttaacatatcccaataatcctaccggttcgacagcgacacaagatgattttgatgaagcgattcatcgttttaaaggtactcaaacaaagatagttcatgactttgcatatagtgcttttggatttgacgccaaaaatccaagcatattagcttctaaaaatgcaaaagatgttgctatcgagatattctctttatctaaaggttataatatgtcaggctttcgtgttgggtttgctgttggtaataaaaaaatgattcaagcgttaaagaagtatcaaattcatacaaatgcaggtatgtttggagcacttcaagatgctgctacgtatgcactcaatcattatgatgagtttttagaaaagcaaaatgaaatatttagacgtagacgtgataattttgaatcacaactaaaacatgcacatttaccgtttgttcactctaagggaggtatttacatttggttacatacacccccgggttatgatagtgaagcattcgaacagttgttattaaaagaaaagtcaattttagttgcacctggtaaaccatttggtgaaaatggtaatcaatatgtgagggtttcattggcgctcgatgataaacaattagaagaagcggcgaatcgcttaacacaattacggtatttgtatgaaagataa

SEQ ID NO: 8986 - DNA, 1617 bp, Staphylococcus epidermidis; identical to SEQ ID NO: 6437

SEQ ID NO: 8987 - DNA, 135 bp, Staphylococcus epidermidis; identical to SEQ ID NO: 6434

SEQ ID NO: 8988 - DNA, 126 bp, Staphylococcus epidermidis
atgaaaaatgtactaaaacaagaaaacaaatacgtctcaaaagaactaaaatcaaaaaatacaaaaagcaaatcaatgattattttgagcgaaagtatcgatacgaatttcaaaaatctattttaa

SEQ ID NO: 8989 - DNA, 258 bp, Staphylococcus epidermidis; identical to SEQ ID NO: 4012

SEQ ID NO: 8990 - DNA, 267 bp, Staphylococcus epidermidis; identical to SEQ ID NO: 4013

SEQ ID NO: 8991 - DNA, 171 bp, Staphylococcus epidermidis; identical to SEQ ID NO: 4014

SEQ ID NO: 8992 - DNA, 327 bp, Staphylococcus epidermidis; identical to SEQ ID NO: 6755

SEQ ID NO: 8993 - DNA, 1278 bp, Staphylococcus epidermidis; identical to SEQ ID NO: 3689

SEQ ID NO: 8994 - DNA, 1041 bp, Staphylococcus epidermidis; identical to SEQ ID NO: 3688

SEQ ID NO: 8995 - DNA, 954 bp, Staphylococcus epidermidis; identical to SEQ ID NO: 3687

SEQ ID NO: 8996 - DNA, 1353 bp, Staphylococcus epidermidis
atgagtaaatcatatgacttaatcgtaataggagctggacctggtggctatgtagctgcaatacgtggtgcgcaacttggtaaaaatgttgcagtcattgaaaaaaataatgctggaggcacgtgcttaaatgtaggttgcatcccctctaaaacgttgttagaacacggcgagaaagcacacagcatacgagttgcaaacgattggggaatcacaacgaaagacttaaaaattgattttactcaatttgtccaacgaaaaaagaaagttgtacaaacacttacgggtggcgtgaagcagttgttaaagaaaaataaagttacttatattgaaggggaagcacgaatttctaaaaacttaaaagtggacgttaataatgaaacgtatcaagcgaaagatataattttagcaactggcagtcagccgttcattccaccaattgatgggttagatcaagtcaattatgaaacaaccgatacatttttcgatttagagaagctaccaaaacagttagcggttatcggtgggggtgtgattgcaacagaactcgcatcctcaatggctgatcttggagttagagttacgataatagaagttgcagatgacattttattaactgaaatcaacgaaactagagaaatgttaaaagcacatttagataatcaaggtattaagatactgacgaaagcaaagataaaacaagttaaggaatcgaaaataatattagatgggcaagatgatgttagctttgatacccttcttgttgcaacaggtagacaaccgaatacgcaagttgcaaaagatttaaatttggaaatggatggtaaattctttaaagtcaatgaacattatgaaacgagtcaaaaacatgtctatgctataggagatttaattaaaggatatcaacttgcacatgcagcaagtgcacatggcattcatgttgtcgaaacaataatgaacaaacagccgtcacttgtgcgtcaagaagatattacgcgttgtatatacacaagactggaagcagcatcagttgggttatcagaagcgcaagctaaagaggctggttatgatgtgaaagtgactcaatcagcatttcaagggaatgcaaaggcgttaatcaaaggagaaaatgaaggatttattaaacttgtcgttgataaaaagtatggagaggttcttggtgcttttattgtaggaccacatgctacagatatcattggagaacttttaagtgtcaaagcatcagagggtacgattcatgaactttctcaaattattcaaccacacccggctttattagaagcaataggtgagagtgcagatgcattttttgattctgcaattcatatgtag

SEQ ID NO: 8997 - DNA, 1419 bp, Staphylococcus epidermidis; identical to SEQ ID NO: 3685

SEQ ID NO: 8998 - DNA, 912 bp, Staphylococcus epidermidis
atggacaaattaacagtaggtttagaatggtttttaaatcctgatcatatgccgttaatcttaggtatcgaaaaaggttggtttaaagaagaatcattagaaattgagatgattgaaccaaaggaacactttgacgcactagacgagattgaaaatggttcaatggatatcgcgattactgaacctattcatctggttcaagatagagctaaagaacaaaacgtcatcgggtttgcgagatatcttcacactaacggaggtattatgtataacaaagataaaaatatcgctcgccccaaagatttaatcggtaaacggcttcaatatcccggtgctcccggtccaggtggtattgctatggctaaaacgatgattgaagctgatggtggtacatttgaagaaggtgacatcacaccagttaatcatagtttttatcatactgatgcacttttaactgataaagctgatgctgctacactcattttcgaaaattttgaaattcttgaagctagaaatcaaggacttaatgtagattattttccacttaaaaattataatgtacccgatttttgtcaactcattttcattacaacacctgaagtattaaatacgagtgaggttaaactcaaaaagttcctaaaaatcattcaaaaagcaattcattacatcaatcatcatttagaaagtgcaattgaaatttactcaacgtatactcaaaccgatatctctaaccaattaaacaaagatacaattgaagcaacagctaaatgttttacaaatgatttgtctatgagttccgactactacaatgatttacagttgtggcttaaagaagtcaatgatattaaagacacgattaacccaactttatattttacaaatcaactactattcagtcgatatacaaaataa

SEQ ID NO: 8999 - DNA, 906 bp, Staphylococcus epidermidis
atggtgtcttcggagtataaaaaaggaatatttttagctttaggtgcttatattttatgggggattttacccatttattggcgtttaattgatgaaataggcgcttttgaaattttggcattccgcattattttttcagtgatatttatgatttttgtgctcattataggaaaaaatcaacggaacgctttttttagagatgttaatcagttggtatcgcatcccgtgcaacttattgccatcatagttgcagggtatgttattacagtgaattgggggacatttatttgggcagtatctaatggtcacgtgctacaatctagcttaggttactacattaacccactagtgagtatcgtcttggcgcttatatttttaaaagagagatttaataaattcgaatggttagccatcatctttgcactagtaggcgtactttatatgacaataaaaatcggtgaatttccatttatttcacttctattagcattttcttttggtatatatggtttattaaaaaagattgtgcatatcgatgcgataagtagcatcactattgaatgtattgttactgcaccagccggtttaatctatgttatttacctatggcagcaacaacacataacatttggattaaatatatcatcattttggctactattttcaggtgcaattacagcaataccattgattctgttctcagcaggtgctaagcgaattccattatcgttaactggcttcattcaatatgtagggccgacaatcatgtttatcttaggtatctttgtctttaaagagccatttaacactgatcaattgattacctttatttttatatggataggtattgtgttatatagtatttctcaatatgttcaaattaagaaaaacccagttgtaaaatag

SEQ ID NO: 9000 - DNA, 498 bp, Staphylococcus epidermidis
atgaagtcttcagttcgattgttgaatcacatcataaagataatgaacttacaacaatcattaattataagagatgaacagtggaatcaatcttatgaggcatacaattttaatattaacgactacgtatttaaaagtaggttagctaaaaaaacaacaaagaaaaaaggatattttttatcgctttgggaaaaagataaaacaaagaaaaatcgtgcatttgactacgagtcatttcctgggaaattaattgtacatgtgatagatgattatcaagtaggtcagtttatttttccaaaacatgtacttttccataaaggtattttaagacatcatgaatctaaagggaaaaaggcttttcgagtgtatcctacttgggagaaagatttaaatcgtgtcgctcaaaagacacaagcgtggcaaaaacaatactttatagatatgtctcaaacaattgatgtaccaagtattaaacgtgcttattttaatgaagattga

SEQ ID NO: 9001 - DNA, 1704 bp, Staphylococcus epidermidis
atgaaaagtgcccaagcacttgaacagactttaacatcgttagacggtcaaaagtacggtgcgtataagcaaataaaagacctatacgaatttaatttatttaaactacgtattgaccatatccaagctgatccatttgcgccaccatctaagatgagtgttgttatagatcgccaacaagcaaaatttcctgattctttattaaattctgaactgaaacaacgggctgtgagtgattacttaacgcgcgtgtttcataagcagattcaatcaatagtagcccaagataaaaaagtaagtaaaattcaaattgatagttgtggccaagaaatcttagagcgtaccgcagtagtaattaagaatcgtcaaattgaggcacgtattgaagttggattaccagcacgaggacgtaccatattaggtagaatagcaagacatacacttattaatgtattacctcaaatagtagaacatgccttatgttatcgcaacattaatgtttcacaattggaacaacaagttgaattaatgatagatcaagaggagattagacaacagttagtaaaacgtgaccttgttgcatttgtagcaaatggtgctattttaccaagaaaaagtggtgtttcagatctccctatgaataacgctattgaatttaaaagtcctaaacaatatgagattgtaatgaaactatcgagtggcaaagttattaagggtatgggtattcctaaaggcattacactaatagttggaggcggttatcatggtaaatcaacattacttgaagcgttagaacgaggtgtatataatcatattgctggtgatggtagagaatatgtgatcacaaatcaagatgcaatgaaaattcgtgctgaagacggaagaagtattcaaaatgttaatatccagccatttattgatcatttgccaggtgaaaaagatactacacatttttcaactgaaaatgcgagtggtagtacgtctcaagctgcaaatgtcatggaagctttagaatcacaagcatcattgttactcattgatgaagatacatctgcaacgaatttcatgattcgtgatggtcgtatgcaacgtttaattgctcccgaaaaagagccgattacccccttttctaataaggtaaaagcattatatgacgaccataacgtgtcgactattctaatcgttggaggttcgggagattattttgacgtggcagatcaagtattgatgatggatgaatatgtgttgaaagatgttacgcaacatgctaaagacattgcgcagtcagacggttatcaaagaaggctttcttctcactatcagttcggtcacattccatcaagaattccgttgagagcgagttttaatcaaaaagggaaacgtgatcgctttaaagctaaaggattgaatgtagtaacgtatggtaaggaaactaatcatatttctggcttagaacaacttgtcgatgacagtcaaacacaaggtttagcgatgatgttaagttatgtaaaaaatgaattgctagatgacaaaagtacgattgtagaattgaccaatagtttgtatcaacggattgagaaacacggattagatgttatatcaaatcatcaggggcatcctggtcatttagcgctacctagaaagcaggagtttattgcgacacttaatcgatatcgtagattaaaaataaagcaaagggaataa

SEQ ID NO: 9002 - DNA, 1341 bp, Staphylococcus epidermidis
atgaaagcaaataagtatttaatctttattttgggagcacttggtggcttattatatggttatgataatggtgtgatttccggtgctttattatttatacataaagacatacctctcaatagtacaactgagggtatcgttgtgtcttcaatgttaattggcgcaatagtcggtgcgggaagcagtgggccacttgctgataaattaggtcgtcgacgtctagtaatgctcatcgctatagtatttattattggggcactgattcttgctgcatcaaccaatttagcattattaattattggacgtttaattattggtttagcagtgggtggttcgatgtctacggtacctgtttatttaagtgaaatggcaccgacagaatatcgtggctcactaggttcacttaatcaactaatgattacaattggtattttagcagcatatttagtcaactatgcatttgcggatattgagggttggcgttggatgctaggattagcagttgttccatcggttattttacttgtgggtatttattttatgcctgagagtccaagatggttacttgaaaatagaaacgaagaagccgctcgtcaagtgatgaagattacttatgacgatagcgaaattgataaagaacttaaagagatgaaagaaattaacgctatctctgaatctacatggacagtcattaaatcaccatggttaggtagaatattaattgtaggttgtatatttgctattttccaacaatttattggtatcaatgcagtcattttctattcatcttcaatctttgctaaggctggactgggtgaagcggcgtctatattaggttcagttggtataggaactattaatgttcttgtaacaatagttgccatttttgtagtagataagattgatcgtaaaaaactacttgttggtggtaatattggtatgattgcctcattattaattatggcaatcttaatttggacaattggaattgcttcatcagcgtggattattattgtttgtttatcattatttattgtattctttgggatttcttggggacctgttctatgggttatgctacctgaattattcccgatgcgcgcacgtggcgctgctacgggcatttcagcgcttgtgctaaatatcggaacgcttatcgtgtcattgttcttcccaatattaagtgatgcattaagtacagaatgggtatttttaatctttgcattcataggtgttttagcgatgattttcgtaattaaattcttaccagaaacacgcggacgtagtttagaagaaatagaatatgaattacgtgaacgtacaggagcaagaactgaataa

SEQ ID NO: 9003 - DNA, 2187 bp, Staphylococcus epidermidis
atgaaaaataaaaagaattcatatagcattcgaaagttaagtgtaggtgcgtcttcaatcattgttgcatcgatgttatttattggcggaggctcagtacatgctgctgaatccaatcaccttgaaaatcaagaacaatcagaagtaagtgcatcacattctattgagatgcaacacaaaaatcaagaaactcaacaaactgagaataaagataataaaactaaccattcagaaacaattgataagactccaactatacataacaatggctactcatatcatgagacacctagtactgacgttaaatctaatgaagacaaacaaattgatagtcaatccaatcaacctcagacatctatgtcaaataatgatcaacaaaaccctaaaaaagtagcggaacatacaacgaaaagtataaatgcaaaaaaagaagaaactagaaagaatgaaaatgcaaagagcctagtacaaccccaacaagatgataaaacaacatctgaacaaacaaaaatgaaagaatcacgtgaacaggagattacaaacgagcaaaagcagttacaaagtaaagatgtaaaaaatgctcaacaagaaaatcaaaatatagaccaagaaaaatctcaagaaaaaattaaagtccaacaatcgaacatcgaaaaggctcaaaaatcttcaagaatagatggaaaattagataatcaatacaataaagatgcaacgcaatcggatgaggggactgcatctgagaacgtttcagaacagcatataacagcaaaagatggaggtgttacacgaaataatcgtggagataaacatttaaatcaagaaaagccaacaacatcatcagataaagaacttaaagtggatgacatagacaaagatctttccacaaaagaatctcctgaaaatgaaaaagatgattctagaaaagggattaaagcactcactaaaaactctcaggcaacaacaagaaatactgcgacaacagaggcatccaaagaattgaaggatcaaacaaataaagtagcatcacaaaaagaatataaaaatcatgatcctattattcttgtacacggctttaatggttatgcatcaggaactggtcccgttacaggaaaaggtaactattggggtggtaaccgtctcaaaattattcaagattatagagctaaaggttataacgtgatggaagcaagtgtaagtgcatttggcagtaattatgatagagctgtagaattgtactattacattaaaggtggacgtgtagactatggtgcggcacatgcggcaaaatatggacacgagcgttacggaaaaacatacgccggcgcttataaggattggaagcctggtcaaaaaattcatctcattgggcatagtatgggtggtcaaacaattcgttatcttgaagagttattacgacatggtagtccagaagaggtagaataccagaaacaacatggtggtgacatttctccgttatataaaggtggacaagataatatgatatcgtctattactactattgccacaccacataatggcacccatgctgcagatttattaggtaatgaagaaattattagacaagtagcatatgactatgcaaggtcaaaaggtaataaattatctcatgttgatgttggtttaagtcaatggggacttaaacaaagagaagacgaaacattagctcaatatattcaacgtgtgaaacaaagtaaattatggacaacaaaagataatggattttatgatttaactactgagggtacagatatcttaaatcaaaaaacatccttaaaccccaatattgtttacaaaacatatcagggtgaatctacaagaccaggtccaaatggtactcaaaaagcagatgtcaatatgaacataggctatacattaactgcaaatacgattggtaaagtaaaagacaaagcgtggagagaaaacgatggactagtgtctgtcatctctgggcaatatccattgaaccaagcgcatacgtctgcgacagatcaagttcaaaaaggagtatggcaagtgacaccagttaaacataattgggaccatggtgacttcgttggtacagatacatcagaagttcgtatctctaaagaagaattagaagatttctgggacaacatgtttgaagatatggtacgtaatgaaaaagtgacagataaacaataa

SEQ ID NO: 9004 - DNA, 624 bp, Staphylococcus epidermidis; identical to SEQ ID NO: 5545

SEQ ID NO: 9005 - DNA, 7164 bp, Staphylococcus epidermidis
atgaatattgaagcactatattttcaaaaatatttttattttaaacatttaaatcaatcaagttcagaacacagtgtgacatactgggtaaagttaagtcgcgacattgagttacatagattaatgtatgcattagtagatgtcgttcaaaatcaacctgtgttgcgtacacagtttgtgacagatgattttaatcaactcaagataaatttaagagatttttttccatttattgaaattaaagaagttaatgaaatgtcgcaaagcatagatttagaagcattctttacacgtaatttaaattcctaccatttcaatcaattacctctgtttaattttaagatatatcaatttctagatgacgcctacttacttttagatttccatgctactatttttaatgaaagtcaattaactccatttttacaacaattaaatatcgcctatacccactctttaaaaagtgaatatagtatctcggatttttataattggattaaagaaatgaatcaaaagatggatcaaaatcaagttgtgtgtccatcaaagcacttcaacgtattgaatgcagacggtgataattacgcttacatacctgttaagaatacatgtgaaaagaaaaaaatgtgttctttgcatgcagaactaccatctttagacattgatgtgtggattgtaagtatttacttagcgcatcattttataagtcaatcttctgatgtgacgttaggcatccatttttcgatagataataaaaatactgagaatatgatggttttaaacacagacattgccccacttaatttaagtattagtcaaagtgacgtcgtaaaagatatggtagatgagtgttccgcgctacttgaagagcttcaaatgtgtggtgcgtcttttgttgttcaacctaaagcagtacaaacagatgtagaaacgatgattcatattgaaaaagtacaagaacaatttgagcttaatcatatatgtcatcatatacatcgtctatacaatgaagcatcatcattcgcggatttagagttttatcctcatgtgcaggatggttttgatatagtttataatgacaacgtttatgatgatttaactgtacatacgttagtcaaattaattaatgggatttatatgcaaattacacaaaatccatcattattaattaaagatataaaactcagtgatcgctcagatttagctaaatataatgacatcaataatcaaaacaatgacattaattatagtgaggtcacttataaaaccgtggttgaaagattcgaacgtcaagtgcaccaacatcccgatagtattgcgttgcaatatgaacaacgatcgatgacatatcatcaattaaatcaatgtgcgaatcttttagcatatagattgcgtttaaatcatcagattgaacctaatgatatggtggcattaatagcagaacgcagcttagaaatgattattggaatgttagggatcttgaaagctggtgcaggctacataccaattgatccggattatcctgaagaaagaatgaattatattattgaggacgcaaaacctaaagcggttgtaacatatcgtacatcatttcaatcaggtttacctcaaatggatatagaattgatagttgattcaagagaacatgatattgataacccgagaggcattaattgttcagaagatatcgcttatgtcatctatacatcaggaacgactggtaaacctaaagggacactggtgccacatagaggaattgatcgcttagtacacaatccaaattatgtcgaattgaacgaaaatacaaccgtcttattatcaggaacagtagcttttgatgcagcaacctttgaaatatatggtccattattgaatggtggacggttagtcattacatctaaagatacgttgttaaatcctcaattgttagatcaagctattactgaaaataaagtcaacacgatgtggttaacgtcatctttatttaatcaaattgctagcgaacgtatcgaagcactagaatctttaacttatttgcttattggtggggaagtgttaaatgctaaatgggttcacttattaaattcgcgtgagtgtcatcctcaaataatcaatggttatggaccgacagagaatacaacatttactacaacttttgcgattccacaagagatgccttcacgtatacctattggtttacctattagtggaacgacagtttatgtcatgcaaggtaatcgtatttgtggcgtaggtgttccaggtgaattgtgcattggtggtgcaggtttagcaaaaggttatttaaatcaacctaaacttactgctgaacgttttattcagtcaccttttaacaatgaaatgctttatcgaagcggtgatttagttcgtcttcaagaagatggctatattgattatattagtcgtatcgataagcaagttaaaatacgcggttttagaatagaattatcagaaattgaaaaagcattagaagctatacgtgatattaataaagctgtagtcatcgttcgagagcaagaccaagataaacaaatagtggcatattatgaagcatcgcaattaaaatcaacaggtcaattaaaagatattttaagtgaaacattacctgaatatatggtacctgtgcattttatgaaggtggatcgtatacctatcacgatgaatgggaaattagatgtgcgttcattacctgaaattaatctaaagaataatagaaattatgtagaaccacgtaatgatattgaacgtaccgtttgccgtattttcgaagagattttacatgttgatcaggtaggtgttaaagataatttctttgaactaggtggacactctcttagagcaacattagttgtaaaccgtatcgaagaaaggttaaaaaaacgtcttaaagtaggtgatttaatgaaatcgcctactgtagagcaacttggacaacaaattgaagaactgcaaaatgatgtctatgaagtgattcccaaagcaaatgaatcgtatcaatatgatttaagtgcgtctcaaaaaagtatgtatcttttatggaaggtcaatcctaaagacacagtgtataacattccattcttatggagattatcttctgaacttaatgttatgcaattgcaacgtgcattatctaagttgattgaacgtcatgaaatattacgaacacaatatgtaattgatgacaatgaagttaaacaacgtattgcgacacatgtttcacctgattttgaagaggtaacgacatctctaacgaatgagcaagatattattcaatcatttatggaaccgtttgatttagaacaaccaagtcagatgcgagttaaatatatacatggaccacaacaagattatttatttatggatactcatcatagtattaatgatggtatgagtaacacgattttactatctgatttgaacgctttataccaagataaatcattacctgaacttaagcttcagtataaagattatagtgagtggatggtgcacagagacttatctaaacaacgtcacttttggttacaacaatttgaaaatcaggttccaatattaaatatgcctacggattatcctagaccaagtattaaaacaaccaacggtaatatgttgacatttcattacaatcgtcaaatcaaacagcaattgaaatcttatgtagaacaacatcaagtgacagactttatgttctttgctagtgcaatcatggtattattgcacaaatatacacgtcaggacgatatcgctattggtagtgtaatcagtgcgcgtacccatcgcgatactgaaaatatgttaggtatgtttgctaatacacttgtatatcgtggtcgacctcatgatcaaaagacatgggatcaattgatggctgagatgaaagaaatgtgtctaggggcatatgaacatcaagaatatccttttgaaagcttagtcaatgatcttgttgatgaaagagatgcttcacataatccgttatttgatgtgatgctcgtacttcaaaataatgaaacaaatcatgcgaattttggacatagtcaattgacacatattccacctcagtcaacaacagctaaatttgatttgtcatttattattgaagaagatcaagatgactatgtcatcaatattgaatataatacagatttatataaacaagagaccattcatcatattgctgaacaacttcaaatgattattaaacatgtaatatctaccgaaaacctaaaaattcaagatattgatgaaaatgatgacttattaatttggttggacaagcatgtgaatgattgttctttagacttgccaaaaaataagtcaatacagcaacttttacatgatgtcatgaaagcgaaagcagatgatgtagcacttaaaatgaatggacaatcgatgacgtatcaagaacttgatgattattctaatagtatggctcaaacattgatacaaaatggaattcaaaaaggggaacgtgtagcccttttaactgaacgaagttttgaaatggttgctagtatgattgcagtattaaaagttggaggttcttatgtacctattgacgtcacttatcccaataaacgcattgaatttattattgaagacgctgaagtcgcagcagtgctcacatatggaaaaacaatatcctcacatataccagtaattaaaattgaagatattgataacactgaaaataataaaaggttaaatatagaatatgcagggaatttggaagatgatatgtatcatatttatacatctggaacaacaggaaagcctaaagcagtatcagtgaaacaacgtaatatattaaatttagtatgtgcttggacaaaaagactcaatttatccgatgatgaagtttatctgcagtacgctaattatgtgttcgatgcttcagcaactgatttctactgtagtttattaaatggatatccgcttgtcattgcaacatcagttgagcggaccaatacagatttattagaaaagttaatttcacaagaaaatatcaccatcgcatctattccactacaggtatataatgtgatgcatcatttctatattcctaaagtgattacaggaggtgcgacaagtactccagcatttgttcaacatatttctaagcattgtgatatgtacgttaatgcctatgggccttctgaaaatacagttatcacatcttgttggatatacgaaaaaggtgacgccataccatcgactattccgattgggaaaccgttagctaatgttgatatttttattatgtcaggcggtaaactatgtggcgttggtattccaggtgaattatgtattgcaggagaaagtttaacttcaggatatttaaacagacccgaactttctgctgaaaaatttataaataatccttttgggccaggacaactttatcgaagtggtgatttagcacgattgatgccagatgggcaaattgaatttcttggtagaatagacaagcaagttaaagtacatggctatcgcattgaactaggtgaaattgaaaatatcattaattcagtagatactgttacagatagcgttgttattttagctaaacagggtgagcgtgaagtgctgcatgcttattatgttggaagtcaagaagacgaaaatcatatttcacaacatttaaatcaatatttgcctaaatacatgattcctaagacattaacagctattagcgaaattccattaacaggaaatgataaggtggatgagtcaagattacctgtacctaatgtacacaaaaataaatttgttgcaccacgtaataatatcgaacgagaaatagcacaaatcgttagcggagtgttggacgtatcgtctatgagtatagatgatgacttctttgaaatgggtggtacatcactagatgctatggtggtagtatcaaaactaaaatcaaatggcatacacattacaatgcaagatgtatatcaatttaaaactgttcgttatatagctaatcacacagaaaaacgccaagcactaccagaagtagtattaccagatcatctaccacaattacaatctttggttgaaagacgataccaactaaaatcacaacacctaacgcaatcatctctaggtcatgtattgctaactggtgcaacagggttcctaggcgcatatttaattgatgaaatgcaagatgatgctgatcaaattacatgtattgtcagaggtcatgatatcaatcaagctaaaactaacttggaaaataatttaaattgttattttgatacggctcatgtggataaattaatgaagcacattgatattattttagcggatttatcagaacttgaccatctcattatcgattcagccattgatacaattattcatgctggagctcgtacagatcactttggcgatgatgaaacatttttcgatgtcaatgtaagaagtacacaagcattaattgatttagctaaggataaaaaagcgaaattaatctatatatcaacgataagtgtgggtacggtatttgaagtacatcaagacgatattacattttctgaaaaagatttatataaaggccagttatttacatcaccatacactaaaagtaagttttatagcgagattaaagtgttagaagcggttaatgaaggtttagcagctcagattataagattaggaaatctgacaagtgcttctactggaccattaaatatgaaaaatttaacaactaatcgttttagtattgtcatgcatgatttattaaaaatgccgtttataggagaaagtatatcgaaagctaaagttgaattttcatttatcgatgtcacagcgcgccatattattaaattggcaagatccaatgcaatacctattatttatcatgtatacgcaccatgttcaataactatgaaacaagtaattgacaatgccaaagggtcagaaatgactgtagtaagtgatagtgagtttgaacagaaattacatgaattaggtatgcatgaattgattggtcttaatagtaatggagataatcaaatttcaggtgtgacagattcaaatatgactcaaacagtaatgaaagaattacaaggtgagtggccacatctttcttaccaatggttgcagcagtggtaccatttattgtttgaaaaatttgatgccaactag

SEQ ID NO: 9006 - DNA, 1242 bp, Staphylococcus epidermidis; identical to SEQ ID NO: 3676

SEQ ID NO: 9007 - DNA, 1419 bp, Staphylococcus epidermidis; identical to SEQ ID NO: 3675

SEQ ID NO: 9008 - DNA, 249 bp, Staphylococcus epidermidis; identical to SEQ ID NO: 3674

SEQ ID NO: 9009 - DNA, 1449 bp, Staphylococcus epidermidis
atgttagaaatcactgtcctcgtgtttattacaatttttggtgtaggctctcaatttttttcaaatttagcctatagtttaaatcaaggtatccttcaaacatcctttggtattggctctcaatatctgattatcccctctgtattagctaatttcacttttgctttaggtataccgttggagcatacactcacacataaatatggattcaagcgtaattacttatgctttgtgtttatatttctcattggttcaatcttaggacttctatcttttaacttaatcattctgtctattgctaaaatgattcaaagtttcagttcaggtgtattattctttaccttgttacctaaacttttcttgaactttccaaaacaatatagaaatgtatttttattgatggttattgtaggtttatttggttcaaatgcgcttggaggattatctggtagtttatcattagaattagatcgttggcattggatttttgtagtaaatatcatctccgcgatattatgcttaattctaggcaacgtcatattaagaaaaaatgaatatcatcaaacatcagatattcatattagtcgatcaatgatgattactttagtattaagtaccatttctttaatgattcctatgtcacttcttactcaaaaaggctaccattcattatgggtgtggccgatactcttaattgcaatattttttattgtaaattttatcattacaaatcggcaagctacacatcccattgttcactttcatacactattcagtaaaaagcctttcgtcggtgcaacaatggcaatttcatcacatttaactttattaacaggcattgctggtatcaatgtctatatcgtaagaatattaaagttgccttttgatatttcattacatttctatttctttttctttgttggagtcattataacgggtatcttaaaaatgttcttttatagctctgtcggtgcaggttttttaggtacattgggatcgtcagccttactatatgtaagcatccattggattattctgggaaatacgattaacattccattactttatattcaaggtcttctgctcggcttcggtgcaagcatgaccttagttagtggctcgatggctacattattggacggagatttaaaagaagcagcacaacgttctcaaaccatgcatacaataagaaatttctctgctgctatgttgataccgattatagcttatacgattaagaatcatatccaaaaaggaacacagtctatatatgctgaaaacattactgataaaatgatttaccttaaaaagttgcaagatgttgcgattgatgctgatcatcaaatattcttattaatgattattttcaatatggtcatgttcgtttcttcaattatacaaatgattttaggtaaaggtagacgtattacaccacctcgggaatcataa

SEQ ID NO: 9010 - DNA, 375 bp, Staphylococcus epidermidis; identical to SEQ ID NO: 3672

SEQ ID NO: 9011 - DNA, 576 bp, Staphylococcus epidermidis; identical to SEQ ID NO: 3671

SEQ ID NO: 9012 - DNA, 963 bp, Staphylococcus epidermidis; identical to SEQ ID NO: 3670

SEQ ID NO: 9013 - DNA, 1104 bp, Staphylococcus epidermidis; identical to SEQ ID NO: 3669

SEQ ID NO: 9014 - DNA, 966 bp, Staphylococcus epidermidis; identical to SEQ ID NO: 3668

SEQ ID NO: 9015 - DNA, 876 bp, Staphylococcus epidermidis; identical to SEQ ID NO: 3667

SEQ ID NO: 9016 - DNA, 429 bp, Staphylococcus epidermidis; identical to SEQ ID NO: 3666

SEQ ID NO: 9017 - DNA, 225 bp, Staphylococcus epidermidis; identical to SEQ ID NO: 3665

SEQ ID NO: 9018 - DNA, 1002 bp, Staphylococcus epidermidis; identical to SEQ ID NO: 3664

SEQ ID NO: 9019 - DNA, 933 bp, Staphylococcus epidermidis; identical to SEQ ID NO: 3663

SEQ ID NO: 9020 - DNA, 1557 bp, Staphylococcus epidermidis; identical to SEQ ID NO: 3662

SEQ ID NO: 9021 - DNA, 768 bp, Staphylococcus epidermidis; identical to SEQ ID NO: 3661

SEQ ID NO: 9022 - DNA, 648 bp, Staphylococcus epidermidis; identical to SEQ ID NO: 3660

SEQ ID NO: 9023 - DNA, 960 bp, Staphylococcus epidermidis; identical to SEQ ID NO: 3659

SEQ ID NO: 9024 - DNA, 636 bp, Staphylococcus epidermidis; identical to SEQ ID NO: 3658

SEQ ID NO: 9025 - DNA, 1188 bp, Staphylococcus epidermidis; identical to SEQ ID NO: 3657

SEQ ID NO: 9026 - DNA, 489 bp, Staphylococcus epidermidis; identical to SEQ ID NO: 3656

SEQ ID NO: 9027 - DNA, 966 bp, Staphylococcus epidermidis; identical to SEQ ID NO: 3655

SEQ ID NO: 9028 - DNA, 894 bp, Staphylococcus epidermidis; identical to SEQ ID NO: 3654

SEQ ID NO: 9029 - DNA, 540 bp, Staphylococcus epidermidis; identical to SEQ ID NO: 3653

SEQ ID NO: 9030 - DNA, 1362 bp, Staphylococcus epidermidis
atgatgaaaaataaactaacattaaaagagaatctatttatcggctcaatgctgtttggtctattttttggtgctggaaatctcatttttccaattcacttaggtcaaactgcggggtcaaatgtatggaccgccaatttaggatttcttatcacggctatcggactacctttcttaggaattatagcgataggtgtatctaaaacaaacggggtctttgaaatttcctcaaggataagtaaaatatatggttatttgttcacaattggcttatatcttgttataggtccgttttttgcgttgccaagacttgcgacgacgtcatttgaaatagcattttcaccatttatttcatctggtacggcccaagcgttgttgcctatttttagtattttattcttcggagtagcgtggttattttcgcgtaaaccttctaaaatattagactatattggaaaattcctaaatccggtctttctcatcttgcttggaattgttgttgtgcttgcatttatccgtcctatgggtggaattagtcatgcgccagtaagtgctgattatagcaatagcgtgttactcaaagggtttatcgatggatataatacattagacgctttggcatcattagcatttggtattatcattgttactacaattaaaaagttggggattactaatccgaatacaatcgctaaagaaactttaaaatcaggtacgattagtattatagctatgggtgttatttatactttattagctttaatgggtacgatgagtttaggtcgttttaaagtaagtgaaaatggtggtattgctcttgctcagattgcacaacattatttaggggattatggaattattattttgtcactaatcatcattgtggcatgtctgaaaacagcaataggattgatcacagccttttcggaaacatttacagagttattccctaaatctaactatctttggttagctactggggtgagtatattagcttgtatatttgctaatgtaggtttaacaaaaattattatgtattcaacaccagtattgatgttcatttatcctttagcgattactttaattttattagcattacttagtccactatttaaacattctaagattgtctatcgatttacaacattatttacaatggtggcggcatttgtagatggtgtgaaagcaagtccagagttctttgttaatacaaaatttgcacaaacaatcattggatttggagaaaattatctcccattctttaacattggtatgggatggattgttccagcattttttggtttcattattggtattattgtatactttatgactgctaaaaaatcgtcccacgtacaataa

SEQ ID NO: 9031 - DNA, 1218 bp, Staphylococcus epidermidis
atgactgtattgagtgagcaagacaaaataagattattagctgatatcgtcaagattcaaactgagaatgatcatgaaattgaagtatgtgagtacttaaaagacctgttaagtcaatatgatattgattctaagattgttaaagttaatgattcacgcgctaatttagttgctgaaattggtagtggcgctccagtcttagcaatcagtggacacatggatgttgtagatgctggtgaccatgatgattggacttttcctccatttgaactcacagataaggatggcaagttattcggcagaggtaccactgacatgaaaggtggtcttatggcgatggtcatcgcgatgattgaattgaaacaatcaaacgcattaaagcaaggtacgatacgtttattagctactacaggagaagaaacggaacaatatggtgcacaattacttgctgatgaaggttacttagatgatgtgagtggtttaattattggcgaaccaactagtaatatcgcttactatgctcataaaggttctatgagctgtgtagtcacagcgaaaggtaaggctgcacatagctctatgccacacctaggtacaaatgctgttgatattttagttgattttgtaaatgaaatgaaacaagaatataaaaatattaaagagcatgataaagtacatgagctagacgctgttccaatgattgagaaacatctccatagaaaaattggtgaagaagaatcacatatctactctggatttgtaatgttaaactctgttttcaatggtggtaaacaagttaattctgttcctcataaagcgacagctaaatataatgtaagaactgttccagagtatgacagtactttcgtgaaggatttatttgaaaaagtcattcgtcatgtgggtgaagattatttaactgtagatatacctagcagtcatgatccagtggcaagtgatcgtgataatcctcttattcaaaatattacacgtattgcaccgaattatgtacatgaagacattgttgtgagtgcattgattggtacaactgatgcatctagtttcctaggaacaaatgaaaataacgtagattttgctgtctttggacctggtgaatctattatggcgcatcgagttgatgaatttattagaaaagatatgtatttaagttatattgatgtttataaagatgtatttaaagcatatctagaaaaataa

SEQ ID NO: 9032 - DNA, 756 bp, Staphylococcus epidermidis; identical to SEQ ID NO: 3650

SEQ ID NO: 9033 - DNA, 2247 bp, Staphylococcus epidermidis; identical to SEQ ID NO: 3649

SEQ ID NO: 9034 - DNA, 1191 bp, Staphylococcus epidermidis; identical to SEQ ID NO: 3648

SEQ ID NO: 9035 - DNA, 750 bp, Staphylococcus epidermidis; identical to SEQ ID NO: 3647

SEQ ID NO: 9036 - DNA, 816 bp, Staphylococcus epidermidis; identical to SEQ ID NO: 3646

SEQ ID NO: 9037 - DNA, 879 bp, Staphylococcus epidermidis; identical to SEQ ID NO: 3645

SEQ ID NO: 9038 - DNA, 936 bp, Staphylococcus epidermidis; identical to SEQ ID NO: 3644

SEQ ID NO: 9039 - DNA, 1599 bp, Staphylococcus epidermidis; identical to SEQ ID NO: 3643

SEQ ID NO: 9040 - DNA, 1293 bp, Staphylococcus epidermidis; identical to SEQ ID NO: 3642

SEQ ID NO: 9041 - DNA, 816 bp, Staphylococcus epidermidis; identical to SEQ ID NO: 3641

SEQ ID NO: 9042 - DNA, 840 bp, Staphylococcus epidermidis; identical to SEQ ID NO: 3640

SEQ ID NO: 9043 - DNA, 447 bp, Staphylococcus epidermidis
gtgaaacaatcttattattcgcatacacctcaatctaaaataaaaagtgtagctatcaataaacatgctcatcaatccatttcaattggcattgtatttgttgtcgtcatctttgtaagtgttatccaaatcctattacatcaacgtcttaaacagaacgcacctctcgaaagattatatttggtaccttatagtcaacttaaactatacttgacttatatcagtgtacatgtggtcatactgatgctcatgctattgatgattagccttttaatgcatcaaccattaagcattcttttctacttaaaaacactgattatagttttattttatgaggcaggtattgctttattactttttaaaattaatgttcttagtcaccgtatattcatggctattatttatacggtagcgataggtattatatatttatggattcaattgtaa

SEQ ID NO: 9044 - DNA, 690 bp, Staphylococcus epidermidis; identical to SEQ ID NO: 3638

SEQ ID NO: 9045 - DNA, 774 bp, Staphylococcus epidermidis
atgagtaaaacagcaattataacaggttcagcaggtggattaggtaaaggtattgcagaacgtcttgctaacgatgggtttaatatagtactacaagatattaatgaagcacttctattagaaactgagaaagaattcaaagaaaaaggttatcaagctgtcgcattcaagagtgatgtatctaaaaagaaagaacaggaagaattagttcagttcgcagttacagaatttggtcaattagatgtcatggtgaataacgcaggtgttgatgcagtgacgccaattttagaaattggtgaagaggaattatctaagttatttaatattaacgtaattggtacattgtttggaattcaagcagctgctaaccaatttattaaacaaaaaagtaaaggtaaaattatcaacgcatgtagtattgcaggacatgaatcttatgaagtactcggcacttactcagctacaaaacactctgtacgttccttcactcaaacagctgctaaagaattagcagacaaaggcattaccgtaaacgcttattgcccaggagttgccaaaactgaaatgtgggatcgtattgatgaagaaatggtgaaacttgatgatagtctagaaataggagacgcgtttgaagcattttcttcagaaatcaaacttggaagatatcaagagccatcagatgttgcgaacttagtatcattcttagcttcaaatgattctgattatattacaggtcaatccattttaactgatggtggattagtgtacagataa

SEQ ID NO: 9046 - DNA, 1377 bp, Staphylococcus epidermidis
atgggcgtacagtttaataaagggaaacaactaattgtagcgattatattagggattctcacatactggttatttgcacagtcttttttgaatatcgcaccacatgttcaacgtttttatcatgtagatatgagtattgttaatattgcggtcagtctgacatcactcttaacaggtgtatttatagtcgtagcagggggattatctgataaaataggtcgagttaaaatcacaaatgcaggtctaatattaagtatacttggctctattgcattgattatctcgcatgcaccaattttattattattagggcgtgttttacagggcttatctgctgcatgcttacttccagcaactatcgcgttaattaattctttcttccaaggtgaagaaagacaaaaggtgcttagttattggtcattcggatcctatggtggaacagggttagcatccctatttgctggaattatagctacatttattggatggcgatggattttcgtgttgtcaatcatcttttcaattatcgccttaatattgcttagaggtataccagaatctaaagatgagtctgcatataataaaaaatttgatatcattggaatcattatttttgttgtcatgatgttaagcattaacatagtgattacgcaaggcgatagaattggatggttaaatcctcttatattgatattaattgctatattcattgtgacattaattgcattttatatatttgaaaaacgtcaaggtgaaccatttatagatttaagtttattttcaaataatgtttatatcggaacaacattagccaacttgatggtgaacatggatattggttcattagcattatttaatatttatgttcaagacgataaacatctatcagctgcacaagccggtttaattacaattccatatatgctgtgtagtttgttaatgattcgtgttggtgaacgttttatgcaaaaaagaggaccgcaattgccattgatgttaggtccggtatcgattactgttggtattatacttttagcattcacttctttgcctaatatgatttattatattgtggcatgtattggctttatctttataggtctaggattaggattttttgctacacccgcgctatctacagctgtatctaatgttccagctgaaaaagcaggtactgcatcaggaattatcaaaatgacttctacactaggtgcagcatttggaatcgctgttgtgacaacaatatatacggcattatctgtaaatcacccggcatatttagcagctactatcgcatttatcgtgggtgcaggtttagtgtttatcgcatttattgcggcgtattgtttaattcctaaaaagaatgtagatatttaa

SEQ ID NO: 9047 - DNA, 3018 bp, Staphylococcus epidermidis
atgagtaaggaaatattcgatacttttaaatttaaatgtggtgccgaattaaaaaatagagtattaatggcacccatgactatccaagctgggtattttgatggaagtgttacatcagaaatgattgattattatcaatttagagctggtgatgcttcagcaatcattgttgaaagttgttttgttgaaaatcacggacgaggatttccgggagctataggtattgataatgatgacaaaatacctggactcaaacgtttagcagaagcgattcaagctaagggatcaaaagcgattttgcaactttatcatgccggaagaatggcaaatcctaaatttaatgaaggagagcagccgatatctgcgagccccattgcagcattaagacctgatgctgtaccacctagagaaatgacacatgctcaaatcaatcagatgattgatgactttggagaagctacacgtcgcgctatagaagcggggtttgatggtgtcgaaattcatggcgccaacacatacttattacaacaatttttctctccacattctaatcggagacaagattcatggggaggcagtcgtgaaaaacgtacacgatttccaatcgaagttttaacaaaggttcaacacgtcgttgctgaaaaagaggcttctcattttattataggatatcgattctcacctgaagaaattgaagaaccaggcatacgttttgaagatactatgtttttactaaatacattagcagaatatgaacctgattacttccatatatcagcaaacagttatcaacgtacatctattgtgaatcaagaagatacagaacctttaattaataagtacatcaaaatgcaaagtgcacagttggcaaaaattccattaattggtgtaggtagtattgcccaacgacaagatgcagaacatgcccttgaactaggatatgatcttttaagtgttgggaaagcctatttagtggaaccacaatggacagataaaatttcacaaaacgaagaagtagaacaatttgtcgatatacatgatcagaaagtacttcacataccatcccctttatggaaagtaatggactttatgattttagataaagaagaagagcatcgtaaatatgaaaaattaaaagcacttcaaaataaaaaagttaaatttaacaaaggtacgtatcatgtctatgcaaaaggtcataatggcaacttacctatgaaagtccaattatcagaagataagattgtaagtatcgaggtagatgatagcggagagtctgaaggcatagcgaacccagtgtttgaacgtttacctcaagatattatcaatgggcaaacattgaatgtagatgtcatttcaggtgcgacagtaacaagtgaaggcatcgtgcaaggtattgcagatgcaattgaacaagcaggagaagacccagatattttacgggcgcgtcctaaaccagtcgttcagtggtctgatgaggtcgttgaagagacgactgacgtcgttgtgatcggtacaggaggtgccggactcagtgcagctgctacggtattagatgaaggaaaagaagtcatcatgcttgagaaatttgcggctataggtggcaatactatccgtacaggtggtcaaatcaacgctgctgagcctaaatggcaaaatgcattcccggcacttgctggtgaaaaagagacactcatacagttattaaatcatgatgaaaatgatatagatgaagcttacattgaagatttcaatactttaaaacgtcaaattaaagactatcttgaaaatagcagtaatgaagatgaatatctttttgattctgtcgaattacatcgtattcaaacatatttaggtggtaaacgtaaagatcgtaataatgtcgaaatatcaggtgattatgatttagttaaaacactcacagataacgttttggaatctgtatactggttgaaagacaaaggtgtacattttgatcgttcgtttgtagatatgcctgtgggtgctttatggcgtcgtggtcataaaccaatgaaagcacaaggtttagagtacattgaaaatttaggagactacgttaaacataatcatggtcgtatttttacagaaactactgcagaaaagttaatcaaagaaggtaatcaagttgttggtattgaagcacgtaaagcaaatggtgctaaagtgaagattcatacacgtcatggtgtagtgttggctactggtggctttggagcgaatacaaaaatgctacaacaatataatacgtattgggataatattcctgatgacattaagacaacgaattctcctgcaattacaggtgatggtatccgtttaggtgtgcaggcaggcgctgacatcgtaggtatgggattctctcaaatgatgccgatttctgatccgaagacaggtgcattatttactggattaatcgtaacaccttcaaactttgtcttcgttaataaggaaggacaacgttttgttaacgaatttgaaagtagagatgtattatctaaggcagcattagaacaaaaagacggtatcttctatattattgcagatgcaaatattaaagcactagctatgaatacaactgaggacaaaattaatcaagaattagaagacggcactttagtaaaagcagataccttagaagcattagcccaaaaattaaacattgatacaactacttttgtgaacacgattgaaagatataataccttcgtagaacaaggacaagatgaggatttcaataaaaatgcatttgatttaaaaattgaaaaagcaccattctacgcgacaccacgtaaacctgcaatacatcatactatgggtggtttaaaaataaacacgcatgcacaagttatagatgttgaaggtcatatcattgaaggtttatatgcggctggtgaagttgccggtggtattcatgctggaaaccgtttaggcggaaatgcactggcagatatttttacttttggacgcattgccggtcaaagtgctgtaacgaaataa

SEQ ID NO: 9048 - DNA, 906 bp, Staphylococcus epidermidis; identical to SEQ ID NO: 3634

SEQ ID NO: 9049 - DNA, 996 bp, Staphylococcus epidermidis
atgtataaaaaaggtttaattttattttttgtagcagtactaacattggcacttgctgcttgcggtaaagatagtcataatcagtcatctgatcataaaggaaaattagatgtgaagacaacagtctatccacttaaatcatttgcacagcaaattggtggtaaatatgtaaatgttgaatcggtttaccctaaaggcgtagatccacatacatatgatccaagtcaaaaacaaatggtagatattgggaaatcagacttattcttatatactggtgataacttagatcccgtagctaagaaaatcgctaaagctataaatgataaagataaaacactatcactagaatcgactttagataaaaataaagatttattaaaaggcgaagaacatgaacatgagcacggagaaggtcacgaacatggtaaatcacatgaagatgaacacgaacatgaacatcatcaccatggaaaatacgacccacacatttggttggatcctgtagtaagtcaaaaatttgctaaagcgattaaagatgaattgattgagaaagatagcaaacataaatcttattatgaaaagaattacaaccaactagttaaagagttaaaaggcttagataaagatatgaaacatgctgtgaaaggtaatgaagataaaactgtttatatttcacacgactctataggttatctagctgaacgctatcattttgaacaagaaggcattgaaaatatgaatgcggaagaaccaagccaaaaagatttaacaaatattgttaaacaaattaaagaagataaagtgaaaaatattttaatagaagaaaatgtatctcataaagtagcagatacggtaagaaaagagacaaatgctaaaacaattaaattttacaatatgggatcacacacaaaacaacaagatgatgacaaaaacacttaccaatcatttatgaaagaaaatattaaagctattgaaaaagccctacaaaatgaataa

SEQ ID NO: 9050 - DNA, 1107 bp, Staphylococcus epidermidis; identical to SEQ ID NO: 3632

SEQ ID NO: 9051 - DNA, 1383 bp, Staphylococcus epidermidis; identical to SEQ ID NO: 3631

SEQ ID NO: 9052 - DNA, 882 bp, Staphylococcus epidermidis
atggaaatcattattatcggtggttttttaggaagtggcaagacctcagcaataagtcatttaatcgctgatgcacttgaaaacaacttaaatcctgctgttattataaatgaatttggaaaaagaagtgttgatggccaacttatagaacgtcctgaagtacctatgagtgaaatcactgaaggatgcatttgttgtgcgatgaaatcagacgtatcacaacaactacatgaactatacttaaaatatcaaccagatatcatctttattgaatgcagtggtgtagctgaaccactagctgtcgtcgatgcatgcttcacacccgtacttgcaccttttatcactttaaggagtatggtgggaattattgatgcaagcatgtattcacgaattaaatcttatccacaagacattgcagctctattttatgaacaacttcgtcattgttcgactttatttgttaataaaatagataagatagaggtggaagaaaccgcccgcttgctacgtcaactcgagcacctcaatagcgatgccaatattcaagttggtcaatttggagaattaaatttaaaatcactactagagctaacacatataaattcaaatgcatgtagcactttgcataataatataaatcatcaattcatcgagaatcctaggatacaaacaaaagaagaaatgatcagtgcgttagataacttgtctcaagatgtttaccgtgtcaaagggtttgttcgtttttcagatcagcaacacgtttatttagtacagtatgcacaaggaaatatagaattatctcccattcaacttaaaaacgatgtaccattgtacctcattgttataggaaaacatttaaaacaaatacaacttgatttataa

SEQ ID NO: 9053 - DNA, 717 bp, Staphylococcus epidermidis; identical to SEQ ID NO: 3629

SEQ ID NO: 9054 - DNA, 1884 bp, Staphylococcus epidermidis
gtgggagtcgtgtcaatcattactgggattacaatatttgtcagtggtcagcatgctcaagctgctgaaatgacacaatcatcatcagattctaacgaacagtcacaacaaacagaacaagttgaacaaaaagaagatacaactcatttatcttacgaattgaatcaagagggtgagacagcgagccaatcaaagactagtcaagagaatcaatctgatggcaatgtacaaaaaaagggtaatcaaacacaacaagattcaacacaaacgtcaccactaaatgaccaagaacaaactttaaaggggcaacaatcaaaagataatcatgttaccccaaattcacgtcaggatacatatccaaaaggccaaaatcaagatgataaaggcaaacaacagtttaaagataatcaacactcacaaacagaacatcaacctaatactcaaaaacaaaataatgatcaagattcatcagataaaaagcaacacccatctgatcaaactcaagacttatcttcaaaaggaacacaacctaaacaatcacagtctatagaagatagagataaaacagtaaaacaaccatcttctaaagtacacaaaataggtaacacaaaaactgataaaacagttaaaacaaatcaaaaaaagcaaacatcattaacttcaccacgcgttgtgaaatcaaaacaaactaaacatatcaatcaacttactgcgcaagctcaatataaaaatcaatatccagttgtgtttgtacatggatttgtaggtttagtcggtgaagatgcattcagcatgtacccaaattattggggtggtactaaatataacgtgaaacaagaacttacaaaattaggttaccgagttcacgaagccaatgtaggggcatttagcagcaattatgaccgtgctgttgaactgtattattatattaaaggtggaagagtagattatggtgcagcacatgctgcaaaatatggtcacaagcgttatggcagaacatatgaaggcatcatgcctgattgggaaccaggtaaaaagattcatcttgttggacatagtatgggtggccaaacgatacgcttgatggaacattttttaagaaatggaaatcaagaagaaatagactatcaacgtcaatatggtggtacggtatctgatttgtttaaaggtggacaagataacatggtgtctacgattactacattaggaacacctcataatggcacacctgctgcagataaactagggtcgactaaatttatcaaagatacaattaatagaattggaaaaattggtggaactaaagcgctcgatttagaactaggtttttctcaatggggcttcaaacagaaacctaatgaatcatatgctgaatatgcaaaacgtatagcgaatagtaaagtttgggagactgaagatcaggctgtaaatgatttaacaactgttggagcagaaaagttaaaccaaatgacgacattgaatcctaatatcgtctatacatcatatacaggtgctgcaacacatactggaccattaggcaatgaagtgccgaatattagacaattcccactattcgatttaacaagtcgtgtgataggtggagatgataataaaaatgtcagagtaaatgatggcatagtacctgtgtcttcttcactacatccaagtgatgaagcatttaagaaggtaggtatgatgaacctagcaactgacaagggtatttggcaagtgagacccgtacaatatgattgggatcatctagatttagtcggcttagatactactgattataagcgaactggagaagaattaggtcaattctatatgagtatgataaataatatgttgaaagtcgaagagttagatggtactacacgtaagtag

SEQ ID NO: 9055 - DNA, 1188 bp, Staphylococcus epidermidis; identical to SEQ ID NO: 3627

SEQ ID NO: 9056 - DNA, 318 bp, Staphylococcus epidermidis
atgcataattacaacaacataaacatcgtaagtgacgattcaaaatatcaagaaatttgttggttccatacattagaaggtatttggcatcctgtagaagtagaaacttcaccattaaatattacatttaataaagagataacacctaattacgtttgtacgttaataaatgaagattccagaaaaataattttaagtaatgtagacaatccgaatatcattattgaaatgattcttattaattcaaaaaaattggtttttaatgctataagtaaagaaggcttaggtacctcgcctaaaatcacatttacaaaataa

SEQ ID NO: 9057 - DNA, 687 bp, Staphylococcus epidermidis
atgtatagtataaaaatgcgtgcaagccacgaagatattcatattagtggtgctgaaacaatgtgtgaatttgaggatttagaaaattatttaaaaaaatattttaataaagcctttaatcatgaaaatggaaatatagatttcttaaatttgaaaattgaaaaggttaaggcaccgattcaaacgttagtagcattaccagtggttgaaaatctaaacgatactttaacacaattagcaaaacaaacaggtgtttctgaatatgcgctaaacaaagggttagaatttataaaaaatgatattacttatactggagccattattctatctgcacaaaccggacaacgacttgatagcactgaacaacgaggtatcagggtaactcaattagcatttaaaacatgcaaatgtaatggagaaatatcagaaagagtaaaagatgcacgtgcacttgcaacctgtatcaatgcatttgaaggtgtaaaggcagaactatgtgtatcagacgatttgcattacacgactggatattttgcgtcgcctaagttaggatatcgtagaatctttaatattaaagaaaaaggtacgcgtcacggaggaagaattatcttcgtagacgaaggaataaatttaaatgaatatgtttcctttttagaaacagtacctaaagaaatcatagaaaaataa

SEQ ID NO: 9058 - DNA, 1134 bp, Staphylococcus epidermidis
atggacattaaagcacagttaaaacagattcaagataaaggtttatatagagagcttcagccgattcagtccgtagaaaaacaatatatttatatcaatgaccaatcttatattaattttacttcgaacgattatctcggtataggacaagttgaatatcaacctcaaaatttcttagattttataaagacatatagtatccatctatcaagttctagattagtgagtggcaattcagttgtttatcagcaattagaacaggaaattagcgagcattttaattttgaagacgccttaatttttaatagtgcttacgatgcgaatttggcggtatttaatatttttaaaaataataatgtcgttatcttttcggatcaacagaatcacgccagtataatagacggtattaaattaagtggtttatcaaaagtgatttatcaacatttaaactatgatgacttggaaagtcatttagcgcaggactcgcatctagatgttcaaaaagtgattgtctctgatagtgtgttttctactaatggcactaaagcagatattaataggctagttcatctcaagcaacgttacaatgcgattttaattattgacgcatctcatagtttaggattaaatctctttgaatatcatgcagacattgacatagttacttcaagtttatctaaagcgtggggagcctatggtggcttgatactaagttcaaaagatataaaagatttaattattaataaaggtcgttcgcttatctactcgagtagtttacctagctatcatttgtattttattcaagtgagcttacaacatgtcattgaagatacatacagacgagagaagttgaatgcacttagtgaatattttaatcaccaattcatggaattatttcccaatcaaccattatctaatacacctatcaaaaatatcgtttgtgatagtttggcttcagcacaagcacaatacgacatgttatttgaacatggtatatttgtcagttatttaaggtatccaacagtgtcacagccaacattaagaatttcattatcctattttcatgacacagatgatattgatcgacttttcaatgtaatgaaacaatacgatgaaggtgatagctatgtatag

SEQ ID NO: 9059 - DNA, 1356 bp, Staphylococcus epidermidis
atggctaatacacgagagttaaatcataaagatgcacagtatgtatggcacccattcacacagatgggagtctatgcaaaaaatgacaatattattattgaaaaaggtcgcggaagttatttatacgatactgaaggcaataaatatttagatggttatgcgtcattatgggtcaatgtgcacgggcatcagtataaaaagttaaataaagctattcataaacaacttgataagattgctcattctacgctattaggttcgtctaatattccatcgattgagcttgccgagcagttagtcagattaacaccagatagattacaaaaagtgttttactccgatacagggagtgcgtcggtagagattgctattaagatggcttatcaatattggaagaatatcgatgctaaacgatatgcgaagaagaataaatttcttacattacatcatggatatcatggagatacaataggttctgttagcgttggtggtatcgatagtttccacaaaatttttaaagaccttatttttgaaaatatacagatagaaacaccgtgtttatataaaagtaagtaccgcaatgaagcggaaatgcttaattcaatactgaatcaaattgaaaatatattatctgagagaaatgatgaaatagtaggatttattctagagccacttatacaaggtgcaacaggtttattcgttcatccgcatggttttttgaaagctgtagaacagttatgtagaaaatatgatgtattactaatttgtgatgaagtagctgttggtttcgggcgtacgggagaaatgtttgcttgtaaccatgaagatgtacaaccagatattatgtgtctgggtaaggcgattacaggtggttatttaccgttagcggcaactttaacatctcaaaagatatatgatgcttttttaagtcagagtcacggtaagaatacgtttttccacggtcatacatatacaggtaatcagttagtttgttccgtagcacttgagaatattaatctttttaaaaagaagcatctgattgggcacattcaaaagacatctcaaacattaaagcaacgcttagaggcacttcaacctcataaaaatattggagatattagagggcggggattaatgtatggtgtggaattagttgaaaacaaatcaacgcagacaccactcgatattccaactgtagaactgattatacgtcgatgtaaagagaatggattgatgattcgtaatttggaaaatgtcatcactttcgtacctattttaagtatgtctaataaagaaattaaaaaaatggttaaaattttcaacaaagccttacatcaaacattgggtaagaagtaa

SEQ ID NO: 9060 - DNA, 672 bp, Staphylococcus epidermidis
atgaatatatttgtaactggaacgaatactgacatcggtaaaacgtatgtcactaaatatctctataaggcattaagaacgaggggatatcgggtatgtattttcaaaccttttcaaactgaagaaattggtggaggtagatacccagatttagagatttataaaaacgaatgcgatttagactatgacgtcacgtcactttacacattcaaagacccagtttcaccacacttagcatttaaaattgaaaggcatcagcaattgaaccatcaaacaatgatagacaaactcgaatcactagaagcacaattcgatatgattctcattgaaggtgcaggtggtattgcagtgcctatctatgaatacagtgaccatttttatatgacaacagatttaattaaagacacatcggatttcattgtgagcgtcttaccttcaaaattaggtgcgattaatgatgccatcgttcatcagaaatatattgatcatcatgaactccccccgaatgtgttaatcatgaataactatactgatagcgctattgaacaggataatttacataccattgaaaaattaacacataagcctgtttatacgttaggtcatcaagcgactcaagaaagcttttccgaagcatttatacaacgaattataggagaatccaatggctaa

SEQ ID NO: 9061 - DNA, 135 bp, Staphylococcus epidermidis
ttgtcaattttgtcatttcctgatggatataatttaagtggtagttctaaccctcctaatgtccaacaagaagtggcaggtgcagaatcattatatggtaatccaagagattttattcttaagcataataagtaa

SEQ ID NO: 9062 - DNA, 3117 bp, Staphylococcus epidermidis
atgaggaataaaaaaatatggatatttaatgctactaatgactttgtaggtaatcctaaatggttgttcatatatgtgaataaatatagaaaagatatcgatgcatattggatgtgtgataatgttcatgtggtaaattacgttaaaagtttaggattcaatgctgaattatttcattccaaaaaagcagaaaagattaaaagcgtggcaggtgtatttgtcgtacatcaagtgaaagaacatatccctgtaaaatttgaaaatgaagtcgtcatactaaatctatggcatggggtcggtatcaaacctatagagcgatttgttgactcgccaggaattagatatcgtacatataaaaaatatatcaagtataatgagatgtaccataataaccaattatttttggtcccttcaccgcttatggaacaacattttactaaaatgcttaatttagatgaagatcaaatcatccgagcaggttatccagcaaatatgtttaataaagctgaatttagatcttttgatcattctattaagcggcataaaggtttaaatgctgaaactaaagtagtcttatatgctcctactttcagagattataaaatgaataatttttttggtgaagctatacctgatatggcaaagcttcttaaaactttaaagaaaaataatattttgctaattataaaattacattacttagttaaaaatgatgtaaatttcacaactgccaaaaaaatgtatgagaaccatccaaatattttgttttgggataataagaaagacatttatgaaatattcgaccaaatagatttaggaatcttagattactcatctatttattacgatatgttagcttcaggagttaaaaagtttattagatatatttatgattatgataaatatatggaaaacagaactttagtatatgattacaaagaaaaaacttcaggtgtgattgtttcaagttttgatgaattattaaaagctctagatcaaattgacgctatagaaattaatgaaaagaaaagtaaggaaattataaatgaattttggcaatatgatcaggacgataaaaatggttttgagaaaattatagatacaactttaaaatttagtattaaaaagaaacaattacctaagttatatagctttgatatatttgatacgttgatacaaagaaaaacattaagaccagatggtattttctattatgttaaagataagttattaagaatgagtactgatataccgatatatgtaatacaaaattatccacgtattagaatccaagcagaaaactatgttagagattattataaaaagtctgaatttattcgtgatgaaaaaagaatcgaaataagatttatagatatcattaacagaattaaaaatattcacgagctcacagatgatcaggcgcaacttctatataatttagaaattgaagcagaaatagcaaatgtagaagaaaaaaaggataaaattaaagtgcttcataacttattagacagttatcaagacgtcattctaataagtgatatgtatttgcctaaagaagttatcttagaaatgttatatcaagtagaccctagattaactgaattacctctttatctatcaagtgatataggtaatcaaaaatcaaccagtacactatatttagatgtgtttgaagatttaaagtacaattattcagaatggattcattatggggataataagcatgcagattttaatgttcctaaaaagttaaatatcaaacctattcatcatacaataactaaatttaatggatatgaaaataaaattttaaataggaataagaactatgatacattcttacttacaacacaaatagcaagatttcgtgaaaatgataaaagtagattaaattactatgtatacagttatataagtagttatttcataccatacgtgagttggtctattaaaaaagcaattaaagaaaatattaagacgctttattttatatcaagagacggtgagttacttaaaaaaattgctgatgaaataatatcagtgaaaggatacaatatcaaaactaagtatatatatgggtctcgaaaagcctggaggattccttcgtttattaatgaagtggacaaagagttcttttcgccttttggtaactttacagggttaacgaactttgatagtaccttacgtgcgttgtatatcagtgaacaagaatttgacgatatatttccacagttaaaacatattaaaggatgttctgaattcacaaaaagtacaaaagaattaattagagtttctgctcaaaataataataaatacaaaaagttattactaaaaaaagcccatgaagaacgtaaaattgtgaatgattatttaattcaagaaattgatttcaatgaaaaatttgctttcgtcgaatattggggaagaggttacacacaagattgcttagatcgactcttaaataacattagcaatcaaacgattaatacgatattcttctatgcaagaagtatttatccaacagtaggaacatcaatcagatataactatactagtaaaatgacatcattaatatttattgaatctatatttgccaatatgccgtatcaaagcattccaggatatcgtaaaaataacaacgtagttgaaccagtgataaattttaaaaattataataaacaattatatgacgcaatggacaagatattgccactattcatacaagaattttttaataacaaatatatagatgaagatgaagttgaacgtaatttctatgattttggtgttgagtattttaaaaataatcctgaagatgattttatcgttgaattctttgcaccactcaaagattcagtcatattgtacgaaccagagatagaatatgcacctgccattagctataaaatggcttctcaaaagttattaggaaaaaaagtcccgttaaaaactaaaaataaaagaatgtcattaaaaagatcgccattaggagttcaaaaagcatatcaatttcatattaagtatttaaaaaacagaaaatcaaaaattatacgacaacttctgaataatagagtgattaaggctattatgaagttaaaaactattttaaaataa

SEQ ID NO: 9063 - DNA, 495 bp, Staphylococcus epidermidis; identical to SEQ ID NO: 3619

SEQ ID NO: 9064 - DNA, 1485 bp, Staphylococcus epidermidis
atgagtgaagcaaatcataaaaacatcgttgttgtaggtgcaggaattattggtacgtcagtagcgacaatgctttcaaaagtaagtcctaactggcatatcgatatgtttgaaagactagaaggcgctggtattgaaagttcaaatgaaaataataatgctgggacaggtcatgcggcattatgtgaattaaactatacagttgaacaagatgatggttcaattgatgcatctaaagcgcaagaaattaatgaacaattcgaattatctagacaattctggggtaatttagttaaaaatggtgatatttctaatcctgaagaatttattcaaccattacctcatatcagtttcgttatgggaccaacaaacgttaactttttaagaaaacgttatgaaacactaagaactcttccaatgttcgatacaatcgaatatacagaagacatggaaacaatgagaaaatggatgccattaatgatggaaaatcgtgaaccaggtcatcaaatggcagcaagtaaaattgatgaaggtacagatgtgaactatggtgcgttaacacgtaagttagcacattacttagaacaaaaatctaatgtttcattaaaatacaatcatgatgttgtagatttaacacaaagagaagatggcaaatgggaagttgtcgttgaaaatagagaaactaaagaaaagataactaaaatagcagataaagtgtttattggtgctggcggtcactctattccgttattacaaaaatctggtgttaaacaaagagaacacctaggtggtttcccaatcagtggtcaattcttaagatgtacaaacccagatattattaaacaacatgcggctaaagtttacagtaaagagcctcaaggtaagccaccaatgactgtaccacaccttgatacacgttatatcaatggtaaacaaacattattatttggtccatatgcgaatatcggccctaaattcttgaaattcggttcaaatttagacttattcgaatcaatcaaaccatataacattactacaatgttggcttcagcagttaaaaatgtacctttaattaaatattcaattgatcaaatgatcaaaactaaagaaggttgtatgaactatttaagaacatttattcctgatgctaaagatgaagattgggaactttacactgctggtaaacgtgttcaagttattaaagatagtgaacaacacggtaaaggtttcgtagtatttggtactgaagttgtcaattcagacgacaattctatgattgcattattaggtgaatctccaggggcttcaacatcattatcagttgtattagaagttttagagaaaaacttcgctgatgacaaagaagcatgggaacctgttgttaaagaaatggtaccaacatacggtcgttcattaattaatgacgaaaaattaatgagagaaacacgccgtgaaacttctaaaaacttacatttaaatagataa

SEQ ID NO: 9065 - DNA, 981 bp, Staphylococcus epidermidis; identical to SEQ ID NO: 3617

SEQ ID NO: 9066 - DNA, 279 bp, Staphylococcus epidermidis
atgtgggtgattcactcaagtgaacaccaattaaatcaatccatacaacatcatgacacaaagcaacttcataagattgctaaagataagcagacatatcagtttttaaaaactataaagaaagccgatttcgaaaatgcgacagataaccaaggtagtgggcctattggttattatcgtttagatattaataaaaaacccgtcggacttacaatcaatattaaatataacttccttccagaaaagacaactattaaatcaataaagttatatcaataa

SEQ ID NO: 9067 - DNA, 120 bp, Staphylococcus epidermidis; identical to SEQ ID NO: 3615

SEQ ID NO: 9068 - DNA, 405 bp, Staphylococcus epidermidis; identical to SEQ ID NO: 3614

SEQ ID NO: 9069 - DNA, 186 bp, Staphylococcus epidermidis; identical to SEQ ID NO: 3613

SEQ ID NO: 9070 - DNA, 903 bp, Staphylococcus epidermidis; identical to SEQ ID NO: 3612

SEQ ID NO: 9071 - DNA, 624 bp, Staphylococcus epidermidis; identical to SEQ ID NO: 3611

SEQ ID NO: 9072 - DNA, 813 bp, Staphylococcus epidermidis; identical to SEQ ID NO: 3610

SEQ ID NO: 9073 - DNA, 780 bp, Staphylococcus epidermidis
atgggtatgattgtaattgcgatatcaagaaagttagttactaaatttttcaacgttaatgaaaagaaaaagaaccgtcataaaattaaaagaagtgaaacactatccacattgattcaaaatttaataagttatgtcgtatggtttattgtccttacgtcaatactttcacgtttcggtattagtgtatcagcaattttagcaggagctggtgttgttggtgttgccgttggtttcggagcacaaacaattgtaaaagacattattactggtttctttatcatatttgaaggacagtttgatgtgagtgattatgttcaaattaatgcatctggggtaacaattgctgaaggtaccgttaaaacaattggtttaagatcaacacgtatacaatcagatactggagaaatttatacattacctaatggtatgattagtgaaatagtcaattattctgctacagatgtttcacctattgtgatgataccgatttctccaaatgagaattataaagtgatagaagagaaattattaacatttttacctacattaaagaataaatatgacatatttgtatctgcaccagatttacttggtttagatagtgttgatggcaatgaaatggtgattaaacttttagcacatgttaagcccggaatgcattttccaggacaacgtttgcttcgtaaagaggtcatacaatacttcagtgaagaaggcattcatattccaaaaccaacacttgtaaaacttgataaagaattgaataaaaaagaatag

SEQ ID NO: 9074 - DNA, 786 bp, Staphylococcus epidermidis; identical to SEQ ID NO: 3608

SEQ ID NO: 9075 - DNA, 129 bp, Staphylococcus epidermidis; identical to SEQ ID NO: 3607

SEQ ID NO: 9076 - DNA, 885 bp, Staphylococcus epidermidis; identical to SEQ ID NO: 3606

SEQ ID NO: 9077 - DNA, 321 bp, Staphylococcus epidermidis; identical to SEQ ID NO: 3605

SEQ ID NO: 9078 - DNA, 348 bp, Staphylococcus epidermidis; identical to SEQ ID NO: 3604

SEQ ID NO: 9079 - DNA, 1731 bp, Staphylococcus epidermidis; identical to SEQ ID NO: 3603

SEQ ID NO: 9080 - DNA, 315 bp, Staphylococcus epidermidis; identical to SEQ ID NO: 3602

SEQ ID NO: 9081 - DNA, 1290 bp, Staphylococcus epidermidis
atgacaatattagcaatcacaatttttatattaacgttaatttttgttatatggcaacctaaaggtctagatattggtattactgcattaattggtgctgtaattgctataatcactggcgttgtaagcttttcagatgtactagaagttactggaattgtttggaatgcgaccttaacttttgttgcagttattctcatttcactcatattagatgaaattgggttctttgaatggtctgctatacatatggtgagagcatcaaagggtaatggcttgaaaatgtttgtttacattatgttgttaggcgctattgtagcagctttctttgcgaacgatggtgcagctttaatactgacacctattgttttagcaatggtacgtagtttaggatttgataaaaaagcggtattcccatttattattgctagtggttttattgcagatactacgtctcttccattaattgttagtaatttagttaatattgtttctgctgattactttgatattggatttgttgagtacttcagtaaaatgattatacctaatatattctctttaatcgcaagtattcttgtcttatggctttattttagaaagtctatcccaagaaaatttgatgcagtaaatattagggagccaaaagaagcgattaaggacaaaaagctttttaatatctcgtggattgtactcactgtattgctagttggttatttaataagcgagtttataaatattccagtatcaattattgctggtatcattgctttaatatttgtattattagcacgtaagtctaaggctgtgcatacgaaacaagtaattaaaggtgcgccatggaatattgttttattctctattggtatgtatcttgtggtatttggtctaaaaaatgtgggcatcacaacgcttcttagtgatgtactaacaaatatttcaaattacggcttatttagtagtatcatgggcatgggctttatagctgcattcctttcatccattatgaacaacatgccaactgttttaatagatgcaatagcgattggtcaatctcaaacaacaagcatactcaaggaaggcatgatttatgcgaatgttatcggatctgatttaggacctaaaataacaccaattggttcgttagcaacacttctctggttacatgtgcttactcaaaaaggtgttaaaatttcttggggacaatactttaaaatcggtattattataacgattccggtattatttatcacactgttagggttatatctaacacttattattttctaa

SEQ ID NO: 9082 - DNA, 396 bp, Staphylococcus epidermidis; identical to SEQ ID NO: 3600

SEQ ID NO: 9083 - DNA, 591 bp, Staphylococcus epidermidis; identical to SEQ ID NO: 4018

SEQ ID NO: 9084 - DNA, 777 bp, Staphylococcus epidermidis
atgtgtaataagctaaaagaacaagatactaataaattatatttaagttttgaagaacttaaatatttaagtaattataactatgaaactagaaatcttaatcgttttattggagatttacaaaatatttataaaaagatgctcgagataacttatcgaagagaagatgaggatgtaatagagttttttgtacttttcaatcactttaaaattcataaaacggagaagtatcttgaaatttccactaatcctgacttaaagtttgttttaaatgatattactcgtaattttacaaaattcgaattaaaagaactgactaatttaaaatcttcgtactctaaaaccatgtttcgcttacttaaacaatataaacatactggatatttaaaattatcaatggaagattttagaactcgattagacgtatcaaagtcttatcaaatgtgtgacattactaaacgtgtattaaagccaatatctaaagagcttacacctatttttaataatcttaatattaataaagttaaagctaaaaaaggtcgaaaaattgaatacttagaatttatctttgacgctgagaaacgtattcacaacaaacgacagccacaaataactaatataggtaagtcgcgccaatatactaatcgtgaaaagacacctaaatggttagatgataagatatataaacaatctcaagagtcacatgacgaagatgcaaaattaaaacaagatcgagaggcatttcaacgtcaattagaagaaaaatgggaggaataa

SEQ ID NO: 9085 - DNA, 471 bp, Staphylococcus epidermidis
ttgattgtcgtaagtttattttttgcctttgtcttaaattatgttcctgaaaaatggatattaggattattagggttaataccgatttatttaggaattaaagtagctatttatgatgattgtgaaggagaaaagagagctaaaaaagaattgaatgaaaaaggattgtctaaattagttggtacggttgcaattgttacgatagcaagttgtggtgctgataatattggtttatttgttccgtattttgtgacattaagtgttactgatttattaattactttgtttgtctttttaattttaattttcttcttggtatttactgcacaaaaattagctaatattccaggagttggagaaattgttgagaaatttagtcgttggattatggctgttatttacatagctttaggtttattcattattattgaaaatgacactattggaacaattttaggatttatattttaa

SEQ ID NO: 9086 - DNA, 114 bp, Staphylococcus epidermidis; identical to SEQ ID NO: 6969

SEQ ID NO: 9087 - DNA, 291 bp, Staphylococcus epidermidis
atgttagttagtattccacctaaattaggagtatcatcatttgttggatatttaaaaggtaaaagtagtttaatgatttttgatagacatgctaatttaaaatatagatatggaaatagaaagttttggtgtaaaggattttatgtagatacagtaggtagaaataaaaaggtaattgaaaattacattcgtaatcaattacaagaagatatcgttgcagatcaaatttcaatggaagaatacctagatccctttacaggagaagaaattaaaaaaagacgaaaaaaatag

SEQ ID NO: 9088 - DNA, 453 bp, Staphylococcus epidermidis; identical to SEQ ID NO: 4474

SEQ ID NO: 9089 - DNA, 951 bp, Staphylococcus epidermidis; identical to SEQ ID NO: 4473

SEQ ID NO: 9090 - DNA, 459 bp, Staphylococcus epidermidis; identical to SEQ ID NO: 6361

SEQ ID NO: 9091 - DNA, 1290 bp, Staphylococcus epidermidis; identical to SEQ ID NO: 4471

SEQ ID NO: 9092 - DNA, 1095 bp, Staphylococcus epidermidis; identical to SEQ ID NO: 4470

SEQ ID NO: 9093 - DNA, 1737 bp, Staphylococcus epidermidis; identical to SEQ ID NO: 6358

SEQ ID NO: 9094 - DNA, 543 bp, Staphylococcus epidermidis; identical to SEQ ID NO: 4468

SEQ ID NO: 9095 - DNA, 1044 bp, Staphylococcus epidermidis; identical to SEQ ID NO: 4467

SEQ ID NO: 9096 - DNA, 975 bp, Staphylococcus epidermidis; identical to SEQ ID NO: 4466

SEQ ID NO: 9097 - DNA, 831 bp, Staphylococcus epidermidis
atgatagataatttaattgtatatattaaaaacttaccacatctttttagtttttgtactcaaaggcttaagcaaacatggaagtggtttgcaattagcctaattataggactagtaattattctagcattagagggattttttaatttcaaccatactaccgatattgttcaagtgcgttggttattcagaatttcatcattcatcatattcagcattattatacaatctatttatatagcttataagtactatatcagagatttcgttgtcatgaagtcatttcatatatctgcagttacacctactatagttatagcgatgttaggtttaataacaatacttattctggggatagttattattattcttaagcctgtgaattttgaagcatcaatactttcatttttatattatttagtaattttagcaatttttatcagtgtgacttcgataatattgggcttgctgagttatgcaattaaacatgtaaaactgatatttattatagtaagtgctatcagcttctttatggttccaattacatacatccctaatacaaatttaaatgtggttaatcatattatgatgttaaatcctctgtattatttcgtaaatggtagttcgcaagctatagtatttggtacaatcagcatgagcaatttaccttatcatttatatattattattttaattggaatcatctgtgtgattaattatgcgcttgtgcgtcacatagcatttgataaatatcaaaaccaatctaaccaaaagaattattcaaaaaagaataaagaaaagaaatgtttaaacgtaaaattagataagtaa

SEQ ID NO: 9098 - DNA, 1518 bp, Staphylococcus epidermidis
atgggaagctcaatagttttaaaattactcaaggtaacacattactatagaaatcataattcaaaaaaatggtatcgaccattaggttatgatgctgaggacatcaacctaaataatatttctttgcatatatatcaaggtgaagcattaggtataatcggagaacctggatcttctaaaactttgattggtagaattttaagtggttcagtgaaacctgataaaggtaaggtcgtccgaactaaaaacttgtatttcggtgatattgatgatcgaaagattaataatttaactgtgagccaatatgtgagcgaactcgtacaactttttccttatgaagtaactgagcataaagttgaacaaattattcaatgggcacatttaggtgattacatagaagaaaaggtttctaatttaagcgaaaaatcatacgcacaacttttacttagtattgcacgttcttcaaaaaacgatattatcattttaaatcatgttttatcacatttagatgaaacatttatagaaagagctacagttttatcaaaagattatattgaagctaataaaacactagtcttaattgataatgatgtagaaaagataagcaaaacaagtaactacataacatgggtatcacacggccagatacgcaaggaaggttctctaaatcaggtattaccaacttttagagaacatgaaaaagatcgtactagtttaaaatcagaaatggaaattgagaactttgattatgattggaagcagaatcgctctcgtattcctgaaatgacttataattttaaaagaatagaacgttataatcatgctaagccaccaagatttctagtgagattttggaccttatttgtcagctttttgattgggcttgttttaatgagcgtacttttctttaacaacttaggtatggtcaaactagggaacattaatacccaagcatccatacagaatcagaataaagatacttacgaagaaaaacttgcatatggattagcattagatggatcagttactttaaacgggtctaaagatttaaaaatacctaagtatagtttaattacaattactggagaaaataacaaaagatatcgggtcgaaatgaatcaaaggagatatagtgttagtaaaaatcaagtgttttatttcaatccagctgggttatacgaatctcatacttttaagaaattgtcaccttatataaaatcaaattatagtacttacgtagagtactttaacagtcacttacatcaaaaacatgataaagtaacagaaacgcttagacctgataaagataaaaagtatgttgtaccgatcacgcaacaacctataaaaatgatatttggtgataatgataaactgtctggatttgttattccaatgacaaataaaacggaattgaaaaaaacatttaatatcacgaaagatgtatggattacaaaaagtggaagcggttattttatcgctgatatgaaagaagaaaaatggatttatattgaattgtag

SEQ ID NO: 9099 - DNA, 315 bp, Staphylococcus epidermidis; identical to SEQ ID NO: 4463

SEQ ID NO: 9100 - DNA, 804 bp, Staphylococcus epidermidis
atgccaaaggtaactaaaatagaagtacaaaaaaagaataaagaacgctttaatctctttttagatggagaatttgaaatggggatagatattgatacattagttaaatttaacttaaaaaaagatcaaatacttgaaccgtcagatatgcagaatattcaagaatatgatcactaccgtcgaggtgttaatcttgcaattcaatacttgtcttataagaaacgtactgaaagagaagttatacagtatttagaaaaaaacgatattcaaagtaatgctattcaagatgtcattgactattgctataaggaaaaatttattgatcatgaagactacgcagaaagtttaaaaaacaccatgatacacactacagataaaggaccagaaatatatagacaaaaactctatcaattaggtattgaagttacgattattgaaaaatatgtcgaagcatatgaacaacaacaaccattagatgacgtcatcaaagttgctgaaaaagtgatgaagtctaaaaagggtcctgaagcaaaggtaaagcaaaaagtaacacagtcacttctccaaaaaggatataagtttgaaacaattcaactagttatgaatgaaatagatttttctcaagacgaagaaacattagaccatttattgcaacgtgatttagagaaagtctataataaaaattgtagaaaatatgacagtgataaaagtgttattaaaaccatagaggcactcatgagaaaaggctataattatgataaaattaaatctaaattagaagaaagcggtatatctaatgaataa

SEQ ID NO: 9101 - DNA, 810 bp, Staphylococcus epidermidis
atgaaaagaagcgataaatatacggatgattatattgaacaacgttatgagtctcaacgacctcattacaatacatattatcaaccaatagggaaaccaccgaaaaagaaaaaaagtaaaagaattttcttaaaagcaattatcactatattaattttattgattatattttttggtgtcatgtactttatttcttcaagagcaaatgtagatgatttaaaatcaattgaaaataaaagcgattttgttgctaccgaaaatatgcctaactatgtaaaaggcgcatttatttcaatggaggatgagcgtttctataaacatcatggctttgatataaaaggaacgacaagggcattgttttcaactattagcgatagagatgtgcaaggtggaagtacaattacgcaacaagttgtaaagaattattattacgataatgaacgatcctttacaagaaaaatcaaagaattgtttgtagcgcgtaaagttgaaaagcaatacagtaaaaatcagattttaagtttctatatgaataatatttattatggtgataatcaatatactgtagaaggtgctgcaaatcattattttggtgtaacggtcgataaaaacaattcaaatatgagtcagattagtgtgttacaaagtgctatattagcaagcaaagtaaatgcaccaagtgtgtatgatgtaaatgatatgtcgaataattacatcaatagagttaaaaccaatttagagaaaatgaaacaacaaaattttattagtgaatcacaatatcaagaagctatgtctcaacttggaaattaa

SEQ ID NO: 9102 - DNA, 519 bp, Staphylococcus epidermidis
atggcaaaaaaagtagcaattattctagcagatgaatttgaagatatagaattaacaagtcctaaagaagcattagaaaatgctggatttgaaacagaagtgattggtgatacagctaaccatgaagttgttggtaaacacggtgagaaagtcactgtagatgttagcattgctgatgctaaaccagaaaattatgatgcattattaattcctggtggattttcacctgaccacttacgtggtgatgaagaaggtcgctatggtacttttgctaagtatttcactaaaaatgatgttccaacatttgcaatttgtcacggaccattagtattagttgatactgacgatttaaaaggacgtacaatcacgggtgttattaacgtacgcaaagatttatcaaatgctggtgcgaatgttgtagatgaatcagtagtggtagacaacaacattgtaacaagtcgtgtacctgatgatttagatgacttcaatagagaaattgttaaaaaattagaagcataa

SEQ ID NO: 9103 - DNA, 162 bp, Staphylococcus epidermidis; identical to SEQ ID NO: 4458

SEQ ID NO: 9104 - DNA, 1143 bp, Staphylococcus epidermidis
atgataatatcaaacaaatcccctatttctatcaacaatgatccatgggaagcatataatgatattttagaacataaccaattaacattaagtaatatagaatttacaactacaaatttatgtaatatgcgttgcagtcattgtgcagttggttacactttacaaactaaagatcctgatcctcttccgatggatatcatctatcgacgtttggacgagatacctaacttaagaacattgtctattacaggtggagaaccaatgttttccaaaaaatcaatcaaaaacgtcgttaagcctctacttaagtatgccaaacatcgtggtatttatgttcaaatgaattcaaatttaactttacctcaagaccggtatttagatattgcagaatacatagatgttatgcatatttcacataattggggaaccattcaagagtttactgatgttggctttggtgcaatgagaaaacaacctcctctaaaagccaagttgaaattatatgagcaaatgcttgaaaattccagcactttatcagaccaaggcatgttcgtatcggcagaaacaatgcttaatcaaagcacagtcccttatctaagtaaaatacataacgaagtggtaaatgacatgaaatgtagccgtcatgagattcacccaatgtatccatctgattttgctagccaattaaatgtattatctcttaaagaaatgaaagaagctattcatcatttgttagatatacgtgatgaaaacacatggatgttgtttggtactctacctatctatccatgtttaaatgatgaatatgatcaacatttattgcaacgtttaagaaaatcgaagaatgttacaatgagaaatgaccctgatggtcgtagccgtttgaatgttaatgtatttactggcgatgttattgtgactgattttggtgatgaaaatggtacaatatctaatatacaaaaggataaattgacagatgtattcaaccagtggttaaatactgaccttgcacaatctttaaattgtcattgtgcagaatatcaatgtctaggtccgaatgttttagttaaaaatatgtattacccaaatactgatttcaagaaaaaagaacaaatcatgcatcaacatcaaatattttcataa

SEQ ID NO: 9105 - DNA, 531 bp, Staphylococcus epidermidis; identical to SEQ ID NO: 6346

SEQ ID NO: 9106 - DNA, 1242 bp, Staphylococcus epidermidis
atgacgaattatcataataagttaaaacaatatgcagaattattagtaagagtgggaatgaatgtacaaccacagcaacctgtttttatacgttcatctgttgaagcgttagaattaactcatttaatcgtcgaggaagcatataaagcaggggcagaagatgttcgagtgagctacacagacccgaaattaaaaagattaaaatatgaaaacgaatcagttgaacactttgaaaaacaagaactcaaacaatatgatattgaagagcgtctggattatgttaatcgtggcgcagcgaacttggcgctcattgctgaagatccagagctattaaatggaatagatgcgcaaaagttaaaagcgtatcaaactgtatactcaaaaggatttaaaccatatatggaagcaagtcaaaaaaaccaatttccatgggtagtggctgcgttccctactagggattgggcacgtcgtgtctatccagagttggatgttgaatcagcatatattaaattcattgatgaagtatttgatattgttcgtgtagatggacaaaatccaattgaaaattgggaaaaacacattaaagatttaagtgttcatgctaaacgattacaagagaaaaactatcaagctttacattacatatcagaaggcacggatttaatagtagggttacctaaaggacacatatgggaagatgcaacaagttatgtaaatggggacggtcaacctttcattgctaatatccctacagaagaagtttttacagctccagatagaaacaatgttaatggatatgtaaccaataaactacctttaaatcttaatggtaacattatagacgggtttacattgacttttaaagatggtgtgataattgatgtcaaagcagaaaaaggtgagaaattacttaaagatttaattgcaactgatgaaggtgcttgtagattaggtgaagtagcactagtgcccgatgattcaccaatatcaaatcgacgcacaatattctataacactctttttgatgaaaatgcatcatgccacctagctatagggtcagcttatagttttaatatcaaaggtggtactgaaatgactacagaagaaaaaattgcaaatggactcaatgattccaatattcatgaagatttcatgattggtagtcctgatttaacaatttatgggatattgcaagatgaaacaaaagaattagtttttaaaaatggaaattgggctaaatag

SEQ ID NO: 9107 - DNA, 216 bp, Staphylococcus epidermidis; identical to SEQ ID NO: 6344

SEQ ID NO: 9108 - DNA, 465 bp, Staphylococcus epidermidis; identical to SEQ ID NO: 4453

SEQ ID NO: 9109 - DNA, 285 bp, Staphylococcus epidermidis; identical to SEQ ID NO: 4452

SEQ ID NO: 9110 - DNA, 1179 bp, Staphylococcus epidermidis
atgtcaaaaaaagagaaaacaacttctaaatatcttaattcaatagaagataaagagcataaaaagaataaaaaaatagaagttgaccgtacatatatagaacctcaagaattccaatctaagaaacctaaaaaaaagaatcaagtattttttgtttcccggctgaataaaccagcaaaatacaccgaaaactctaatttcttttcttacctgatttataggataggtaaagatgacgctgcaggtttagcagcacagatgacatatcattttgtattagcacttttcccaatgctaatttttttacttacgctacttggtcaatttatcacgattgatgctaatcagattaatcaaaaagtaagtcaatatgtccctgatcaagaaacagctagcatcgttggtggaattgttaaagatatctctgacactgccagtggaggtattttgtcagttgggttaattttagctatttggtcagcatcaaatggaatgtccgctattattaactcatttaatgttgcttatgacgttgaggattctcgaaacggtgtagtagttaaattattaagtattctatatacacttgttttaggtgcagtatttgttgttgctgtagtacttataacactaggtccagtcattaataaatttttatttggaccactaggtattgataatcaaattgaatggatttttaatttagtacgaattgttattccattgattattattttcatcatatttactgtactttattcagttgcacctaatgttaaaacaaaattacgttctgttattcctggcgctattttcacttccattatttggttactagggtcctttgcattcggttactatatttcaaactttagtaactattcgaaaacatacggaagtttagctggtattatcattttattcttatggttgtatatcacaagctttattattattatcggtgctgaaatcaatgcaattattcaccaaagaaaagtcatagctggtcacacgcctgaagaagccgctattaaacatgatgataacaatgaaaatcactataacgaaaatacgacttatgaatactatgaagatagcaaagatgtagatatctctaatgaagatgacacgtataatatcaatcatcaatctaaagaagaacatcacacaagcgactga

SEQ ID NO: 9111 - DNA, 630 bp, Staphylococcus epidermidis
gtggcgattaaagttttatttgttgatgatcatgaaatggtaagaatcggtatttcaagctatctttcaactcaagaagatatagaagtagtaggtgagggtgcttctggtaaagatgctatcactaaagcgcatgagctaaaaccagatttaatattaatggatttacttatggacgatatggatggtgtagaagcaactactgaaataaaaaaagatttacctcaaattaaagtagtcatgttaacaagctttatagaggataaagaagtttatcgtgcacttgattctggagtagatagttatattttaaagacaacaagtgcaagtgatatagctgacgctgtgcgtaaaacgtatgaaggtgaatcagtatttgaaccagaagtgttagtaaaaatgcgcaatcgtatgaaaaaacgtgccgagctttatgaaatgttgacagaaagagaaatggagatcctattacttatagctaaaggatactctaaccaagagattgcaagcgcctctcatatcaccatcaaaacagtaaaaactcatgtaagtaacatactaagtaaattagaagtacaagatcgaacacaagcagtaatatatgcgttccagcataatttaattcaataa

SEQ ID NO: 9112 - DNA, 1047 bp, Staphylococcus epidermidis; identical to SEQ ID NO: 6339

SEQ ID NO: 9113 - DNA, 702 bp, Staphylococcus epidermidis; identical to SEQ ID NO: 4448

SEQ ID NO: 9114 - DNA, 387 bp, Staphylococcus epidermidis; identical to SEQ ID NO: 4447

SEQ ID NO: 9115 - DNA, 756 bp, Staphylococcus epidermidis; identical to SEQ ID NO: 4446

SEQ ID NO: 9116 - DNA, 987 bp, Staphylococcus epidermidis
atgaatgataaatggtatagacatataattggagcgcgaactattaaaactggtttggctactttttttacgtctttattttgtatgttgttaaacctcactccaatttttgccatacttactgcaattgttacaattgaacctactgctaaagcatcattaaaaaaggggtataaaaggctgccagcaacagttatcggtgcgttatttgctgttgtctttacatatgtcttcggtgatcaatcaccgttaagttatgctttaagtgctacatttaccattctgatatgcactaaacttaatttacaggtaggaacaactgtcgcagtattaacttccgttgcaatgattccaggtatacatgaagcatatgtgttcaatttcttttcacggttacttacagctcttataggacttgttacagctggattagtcaattttatcatcttaccacctaagtattatcatcaacttgaagagcaattagcccttagtgagaaaaaaatgtatcgtttattttatgaacgctgtaatgagttattattaggaaaattcagctcggaaaagactagtaaagaattatcaaaattaaatattattgctcaaaaagttgaaacattaatgagttaccaaagagatgaacttcattatcataaaaatgaagataattggaaattattaaatcgccttacaaatcgcgcttataacaaccgtttatttatttcacatttatctaacattatttatttacccaaacatacgtctatagcttttgatgctaatgagaagatagcattgattaatattagtaatagtattaatgacatcattcaaaaaggaagctttgcacgtcaaaaaaaatctattgcaacactaaagtcttctgttaaacagatggatgagtttgaccaaaatcaaatgaaaagtacactcatatatgaaattctactcatatacaaaattttagattcacgttatgcaaaataa

SEQ ID NO: 9117 - DNA, 537 bp, Staphylococcus epidermidis
atgaagatttttaaattgacgtcattgacactagctgctttaacgttagcctttccgttttcacatgtcgcacaagcacatacttacttagaaaagcatcaccaaacaaacgaaaccaaacaatctcatagcttttctttagaaggtgaggctggtgaaaatccaacatttttaactcaacctcaatttattaattccctagataatggtcatttaaatattaatggttatcagattcagcaagatgatactaatgatattgaatacaaaaaggtttatgatcaagaaattagagctacaagcaatcatacagcgataagtgtacgtttcagtattaataatcaatcactatcacttgaaagtatgaaagatgcatacccaaatgagagattgaatcatattccacatacaagcaatgattcacaatatccagaagacggtatatatgtctatcacggtaaaatgattaaattacaatacaaagtgacacatggatttgttacgagcgtgacgataggtgaaggtgtagacgaatag

SEQ ID NO: 9118 - DNA, 726 bp, Staphylococcus epidermidis
atgaatgaactaacggtttatcatttcatgtcagataagcttaatttatacagtgatattggtaatatcatggcattaaaacaaagagctaaaaaaagaaatattaagataaatgttaaagaaatcaatgagactgagggagtcacatttgatgattgtgatattttcttcattggtggtgggagtgatagggaacaagcgcttgccacgaaagaattaagtaaaattaaaacttctttaaaaaatgcaattgaagatggtatgcctgggttaactatatgcggtggttatcaatttttaggtcataagtatattactcctgatggtaccgagttagaaggattgggtgttcttgacttctataccgagtctaaaaaagaacgcttaactggagatatcattatagagagtgatacttttggcacgattgttggatttgaaaatcatggtggtagaacatatcatccgtatggaacattaggccgagtaacgtatggttatggtaataatgataacgatcgaaaagaaggtatacactataaaaatctattaggttcttatcttcacggcccaattttaccaaaaaatcatgaaataactgattatctacttgagaaagcatgtgaaagaaaagggatactatttgagcctaagaagatcgataacacagaggaagaagctgctaagcaagttcttattaaacgtgcaaaagaaaataaaaaataa

SEQ ID NO: 9119 - DNA, 1314 bp, Staphylococcus epidermidis
atgagacaatggactgcaacccacatggctaagttagcaaggaaagcaagtatagctgtaggtaaaaagggtacagacttgccgggacagattgcaagacgtgtggatcataatattttaagaaaattagctaaacaagtagatgacattgtttttataagtgggactaatggtaaaacgactacatctaacttaattggacatacattaaagaaaaatcaaataaacattattcacaataatgaaggagcaaatatggcagcagggataacttctgcttttattatgcaaagctctaagaatactaatattgcgataattgaaatagacgaaggatctattccacgtgttttaaacgaagtcacaccttctatgatggtgtttacaaatttctttagagatcaaatggatcgatttggtgaaatcgatattatggttgataatattgcaaaatcaataagtaacaaagggataaaattattattaaatgcagatgatccgtttgtgagtcgcttgaaaattgcaagtcattccattgtgtattacggaatgaaaaaatttgcgcatgactttgaacaaagtacaatgaatgaaagtaaatattgtcctaattgtggacgattattgcaatatgactatatacattataatcaaattggacattatcactgtgaatgtggatttaagcgagaagaacctacatatgaagtgtcatcatttgatgcttcaccattcttaaaaatgataataaaccaaagtgagtttaatatgaaaattgcaggagattttaattcttataatgcaatagcagcctataccgtattaagagaattaggattaaatgatgatgcaatacgcaaaggatttgaaacatatacgtctgataatggtcgcatgcagtatttttcaaaaaataagaaggaagctatgattaatctagcaaaaaatccagctggaatgaatgcaagtctatcagtaggcgagcaaattgatgataaaaaaatttatgttattagtcttaatgacaacgcggcagatggtcgagatatttcatggatatacgatgcagactttgaaaagctagctacccaagatatcgaagctatcattgtaagtggtacacgtgctgaggaactacaattacgtctcaaacttgctgaagttgaagtgcctattaaggttgaaaaggatatctacaaagcgactgcattaactatgaaatacagttcatttacggtagcaattccaaactatacatcattaacaccaatgcttgaacaacttaatcgctcatttgaaggagggcaatcgtaa

SEQ ID NO: 9120 - DNA, 501 bp, Staphylococcus epidermidis; identical to SEQ ID NO: 4441

SEQ ID NO: 9121 - DNA, 555 bp, Staphylococcus epidermidis; identical to SEQ ID NO: 4440

SEQ ID NO: 9122 - DNA, 1071 bp, Staphylococcus epidermidis; identical to SEQ ID NO: 6329

SEQ ID NO: 9123 - DNA, 543 bp, Staphylococcus epidermidis; identical to SEQ ID NO: 6328

SEQ ID NO: 9124 - DNA, 1371 bp, Staphylococcus epidermidis
ttggaaacaattaagaaaaacgaagttaaaacgggaaaggttattgatttaactcatgagggacacggagttgttaaagttgatcgatatccaatttttattcctaatgctttaattgatgaagaaattaaatttaaattaattaaagtgaaaaagaattttgctataggaaaattgatagaggtcataagtgaaagtgatgatagagtgacaccaccttgtatttattatgcaaagtgtggtggttgtcaattacaacatatgacatatagagcacaattggatatgaaaagagaacaagtagttaatctttttcatagaaaaggcccttttgagaatacggttataaaggaaactattggcatggacaatccctggcgataccgtaataaatctcaaattcctgtaggtcaaagtaactcgaatcaagttataatgggattctatagacaacgtagccatgacattatagatatggatagttgtcttatacaagatagacaacatcaagaagtaatgaatcgagtaaagtactggctcaatgaattaaatatatctatatataacgaaaaaacaaaaacaggtttaatacgtcatttagtagtaaggactggttatcataccgatgaaatgatggttatctttgttacaaatggagcaacatttaaacaatcagaactattagtaaacaagctaaaaaaagaattcccaaatataacaagtattaaacagaatataaacaatagccattctaatgttataatggggcgtcaatcaatgactttatatggtaaagataaaattgaagaccaattaagtgaagtaacttatcatatttctgatttatcattttaccaaattaactcatcacaaactgaaaaactttatcagcaagctctgaattatgctcaattaacaggaaaagaaatagtattggatacgtattgtggtataggaacgattggtctatatatggcaccactagcaaaacatgtttatggtgtagaagttgttccgcaagccataaaagatgcggaagacaatgcgactaaaaaccaacttaaaaatacgactttcgaatgtggaaaagcagaagatgttatcttaacatggaaatcacaagggattaaaccaggcgtagtcatggtagatccacctagaaaaggatgcgatgaaactttcttaactactcttttaaaattaaatccgaaaaggattgtttatatatcatgtaacccttcaacgcaacaaagagatgcgcaaatattggctgaacaatacgagttagtagaaattacaccagttgatatgttcccacaaacaactcatattgagactgtagcattatttgtacgtaaagacgaagagtga

SEQ ID NO: 9125 - DNA, 951 bp, Staphylococcus epidermidis
atgagaaaacgtgcaagaattatatataatccaacatcaggaaaagaactttttaaacgtgtattaccagatgcactgattaaacttgagaaggcaggttatgaaacgagtgcatatgcaactgaaaaaattggtgatgctacttttgaagctgaaagagcactagaaagtgaatatgatttactcattgcagctggaggtgacggtacgttaaatgaggtggtcaacggaatcgccgaacaacccaatcggcctaaattaggtgtaataccaatgggcaccgttaatgactttggaagagcacttcatttaccaagcgatataatgggggcgattgatgtaatcattgatggtcacacaactaaggtagatattggaaagatgaataatcgttatttcattaacctagctgcaggggggaaactaacacaagtatcttatgaaacaccaagtaagttgaaatcaattgtaggaccgttcgcgtattacattaaaggattcgaaatgttacctcaaatgaaagcagtagatgtacgtatcgaatatgatgataacatcttccaaggagaagctttactattccttttaggtttaacgaattcaatggctggctttgaaaaattagttccagatgcgaagcttgacgacggttatttcacgttaattattgtagaaaaagcaaatcttgctgaattgggtcatattatgacactagcgtctcgaggtgagcatacaaaacatcctaaagtcatttatgctaaagcgaagtctattaatatttcatcatttactgatatgcaacttaatgttgatggtgaatacggtgggaaattacctgcaaatttccttaatttagaacagcacatagaaatttttacacctaaagatgtatttaacgaagaactattagaaaatgatacgataactgatattacgcgtgataagcaataa

SEQ ID NO: 9126 - DNA, 1428 bp, Staphylococcus epidermidis
atgcattttgaaacagtaatcggacttgaagttcatgttgagttaaaaacggactcaaaaatgttctctccatcacccgcacattttggagctgaaccaaattcaaatacaaatgttatcgacttagcttatccaggtgtattaccagtagttaatagacgtgcagtagattgggcaatgagagcttcaatggcattaaatatggatattgctacaaattcaaaatttgatcgtaaaaactatttctatccagataatccaaaagcatatcaaatttctcagtttgatcaacctattggagaaaatggctatattgatattgaagttgatggagaaacaaaacgtatcggtattacacgtcttcatatggaagaagatgcaggtaaatcaacacataaagatggttattctctagtagacttaaaccgtcaaggtacgccattaattgaaattgtatctgaacccgatattcgttcacctaaagaagcatatgcttatctagaaaaactacgttcaatcattcaatatacaggtgtatctgattgtaaaatggaagagggatccctacgttgtgatgctaatatttcacttcgtccatatggtcaaaaggaatttggtacaaaaactgaattgaaaaaccttaactcatttaactacgttaaaaaaggtttagaatatgaagagaaacgtcaagaagaagaattattaaatggtggagagattggtcaagaaacacgtcgatttgatgaatctactggtaaaacaattttaatgcgtgtgaaagaaggttcagatgattatagatatttccctgaaccagatattgtaccattatatgtagatgaagattggaaagcacgtgtaagaaaaacaattccagaattgccagatgaacgtaaagctaaatacgtaaatgatcttggactaccagaatatgatgcgcatgtattaacattaactaaagaaatgtctgatttctttgaaggcgcaattgaccatggtgcagatgttaaacttacttccaactggttaatgggaggtgttaacgagtatcttaataaaaatcaagttgaattaaaagatacgcaactaacacctgaaaatttagctggtatgattaaattaatagaagacggaacaatgagtagtaaaatcgctaaaaaagtttttccagaactagcagaaaatggtggagatgctaaacaaattatggaagataaaggtttagtacaaatttctgatgaagcaacactacttaaatttgtaacagatgcattagataataatccacaatcaatagaagattataaaaatggtaaaggtaaagctatgggattcttagtgggccaaattatgaaagcttctaaaggtcaagctaacccacaaaaagttaatagcctattaaaacaagaattagataaccgttaa

SEQ ID NO: 9127 - DNA, 1458 bp, Staphylococcus epidermidis
atgagtattcgttttgaaactatcgaaaaattaactgaattaatcaaaaataaagaaattaaaccttctgatgtagtaaaagatatatacgcagctattgaagaaactgatccaacaatcaagtcattcttagctttagataaagaaaatgcaataaaaaaagccgaagaattagatgaattacaagctaaagatcaaatggatggtaaactatttggaattcctatgggaatcaaagataatatcatcacaaaagatgtagaaactacatgtgcaagtaaaatgttagagggatttgtacctatttatgaatcaactgtaatgaacaaactacatgatgaaaacgcggttttaattggtaaattaaacatggatgagtttgcaatgggtggctctacagagacttcatattttaagaaaacattaaatcctttcgatcacacagcagtaccaggaggatcttcaggtggttctgcagcagcggttgcagcaggtttagttccttttagtttagggtcagacactggtggttctattagacaacctgcatcttattgtggtgttgttggtatgaaaccaacttatggccgtgtatcacgtttcggtttagttgcatttgcttcttctttagatcaaattggaccaatcacgcgtaatgttaaagataacgcattagtacttgaggcaatttccggtgtagatgcgaatgattctacaagcgcacctgttgatgatgtagattttacttctgatattggtaaagatattaaaggtcttaaaattgcattacctaaagaatatttaggtgagggtgtaagtgaagaagttaagacttctgtaaaagaagcggttgaaacgttaaaatcacttggtgctgaagttgacgaagtctcattaccaaatacaaaatatggtattccatcatattatgttattgcgtcatcagaggcttcagcaaatttagcgcgatttgatggtattagatatggatatcattctaaagaagcacaatcgttagaagaattatataaaatgtctagatcggaaggctttggtgaagaagtcaaaagacgtatcttcttaggtacttttgctttaagctcaggttattacgatgcatactataaaaaatctcaaaaagttagaacgttaattaaaaatgattttgacaaagtatttgaatcttatgatgttgtggttggaccgacagcacctacaacagcatttaatattggcgaagaaattgatgatcctttaacaatgtatgcgaatgacttattaactacaccagttaatcttgccggtttacctggtatttcagttccttgtggacaatcaaacggacgcccaattggtttacaattaattggtaaaccttttgacgaaaaaacgttatatcgtgtcgcttatcaatttgaaacacaatacaacttacatgacgcatacgaaaatttataa

SEQ ID NO: 9128 - DNA, 303 bp, Staphylococcus epidermidis
atgactaaagtaacacgtgaagaagttgaacatattgctaatttagctagacttcaaatttcttctgaagaaacagaagaaatggctaatactttagaaagtattttagattttgcgaaacaaaatgatagtgccgatacagaaggtattgagccaacttatcacgtattagatttacaaaacgtattacgtgacgataaagcaatcgagggcattcctcaagaattagcattgaaaaatgcgaaagaaactgaagatggtcaatttaaagtgccatccatcatgaatggggaggacgcttaa

SEQ ID NO: 9129 - DNA, 1536 bp, Staphylococcus epidermidis
atgtttacattaggtacagctctcagtaatcaaattgatgcaaattggcagacttacgttatgattattgtctatttcataatccttctaattattggcttctatggttatcgacaagctactggaaacttaagtgaatttatgttgggaggacgtagtatcggaccatatatcacagctttatcagctggtgcctctgatatgtctggatggatgattatgggacttccaggttcagtatacagtacaggtttatccgccatttggataaccattggattaaccttaggtgcatacattaattattttgttgttgctccaagactacgtgtttatactgagattgcgggagatgctattacactcccagacttttttaaaaatagactagatgataagaaaaatattattaaaattatttcaggattgattattgtcgtatttttcactctatatacgcattcaggtttcgtttctggcggaaaactctttgaaagtgcatttggattgaattatcatgctggactcttgatagtggctattatagttattttttacactttctttggtggctatttagctgtatcaattactgatttttttcaaggtgtgattatgcttattgctatggtaatggtacctatcgttgcattgcttaaactcaacggttgggatacatttcatgatattgctcaaatgaaacctacaaacttagatttatttagaggaaccactgttttaggcattgtttcattattctcatggggactcggatattttggtcaaccacatattatagtaagatttatgtctatcaaatcacataaattactaccaaaagccagacgtctgggaataagttggatggcagtcggtctattaggagcgattggtgtgggattaacaggaatttcatttatatctgaaagacatattaaattagaagatcctgaaacactatttattgtgatgagtcaaatattatttcatccgcttgtaggtggatttttattagcagccatccttgctgcaataatgagtactatctcttcacaattactagtaacatcaagttctttaactgaagatttctataaactaatcagaggttcagataaagcatcatcacaccaaaaagagtttgttttgattggacgcttatcagttctacttgttgcgatagttgctattacgattgcttggcatccaaacgatacaatactaaatttagttggtaatgcttgggctggttttggagctgcatttagtcctttagtactctactctttatattggaaagatttaacacgtgcaggagctattagcggaatggtagctggtgctgtagttgttattgtttggatttcttggataaaacccttggctacaatcaatgcattctttggtatgtatgaaatcattccaggtttcatagttagcgtattgattacgtacatcgtaagtaaattaacaaaaaaacctgatgattatgttattgaaaatcttaataaagttaaacacgtcgttaaagaataa

SEQ ID NO: 9130 - DNA, 1209 bp, Staphylococcus epidermidis
atgaagcgaacaatatttatactcatgtcgatactgttattattaacggcttgcggagatggacataaacaaacttcatcagataaagaacaaagtgaacataaggataaccataataaaaatcaagtgaaacaaatagcgactgataaaaaagttcaaggtgataactataggactatattacccttcaaagaaagccaagctcgtggattattacaagataatatggcaaatggttataatggagaagattttgaaagtggtttactagaattaagtaaagaaatctttccaacaaataagtatttatatcaagatggacaatatttagataaaaaaacgattaatgcatacttagatccgaagtatacgaaaaaagaaattgacaagatgagcgaaaaagaaaagaaaagcaaaaatgctaatgagaatcttggactcaatccatctcacaatggtgaaacagatgaagagaaaatagctgaaaattctccagcctatctttcaaatatactcgagcaggatttttatggaaatagtgattctaaaggtaaaaatataaaagggatgacaattggtttagccatgaatagtgtttattattacaaaaaagagaaagatggcgaaacatttagtaaagatttatctgataaagagattgaaaagcaaggtaaacagatggctagtgaaatgctttctcgtttacgtgagaatagtgatttgaaagatattcctattcattttgctatctataaacaatcaagtcaagattccattacaccaggtgaatttatagttggtactacggttgaagagggtaaaactaaaattaactcttgggataatattaatgaaaaagcagccttaattccttcgtcaactgcagctgattatgatgaaacgctgaataataactttaaacagtttaatgataatttgcaatcgtatttttcaaacttcacacaagcagttggtaaggttaaattcgtaaataaaaaagctaaacaacttacagttgatttgcctatagattattacggacaggcagaaacgataggtattacacaatatgttacagagcaagccgaaaaatattttgataaactagatgagtatgaaattagaatcaaagatggaaatactccacgtgctctcattagtaaaactaaagacgataaagaaccacaagttcatatctatcataattag

SEQ ID NO: 9131 - DNA, 1998 bp, Staphylococcus epidermidis
atgcaagatgttaaaaagcgtgtggaaaaattacatgacttattgaatcaatatagttatgaatattatgtacaagataatccctcagtgcctgacagtgagtatgataagttattacatgagctgattgaaattgaagaaaaatatccagaattcaaatcgacagactctccaacagtgcgtgtgggtggcgaagctcagtcttcttttgaaaaagtaaatcacgacacgcctatgttaagtttaggtaatgcttttaatgaagaagatttaagaaaatttgatcaacgtattcgtgatagtattggtaaggtcgaatacatgtgtgaacttaaaatagatggtttggctgtttcgctcaaatatgaaaatggtcgttttgttcaaggacttacacgtggtgatggtacgacaggtgaggatatcactgaaaatctaagaactatacatgctataccactaaaaattaaagaacctctcaattttgaggtccgtggggaagcttatatgccacgtcgttcattcattcatttgaataatgaaaaagaacaaaatggtgaacaaccttttgcaaatccacgaaacgctgctgcaggctctttaagacaacttgactctaaactagctgcgaaaagaaagttaagcgtcttcttatatagtgtgaatgacctaaccgagtttaatgcaacaacacaaagtgaagcgctagaggaattggaccaattaggttttaaaactaaccaagaacgtgaacgagtatcagatattgagggcgtacttaattatatagagaaatggacaagcaaaagaggatctttatcttacgatattgatggtattgttataaaagttaacgatttatctcaacaagaggaaatgggttatacgcaaaaatctccaagatgggcgattgcttataaatttccagctgaagaagttattacaaaattattggatattgagctaagtattgggcgtacgggtgttgtgacaccaactgcaattctagaacctgtaaaagtagctggtactacagtttcaagagcctcacttcataatgaagatttaatacatgaaagagatatacgtatcggagatagtgttgttattaaaaaagccggggacatcatccctgaagttgtaaaaagtattttagatagacgacctaacgaatcggaaatttatcatatgccaacacattgtcctagttgtggacatgaattagttcgtattgaaggagaagttgctttacgttgtattaatccaaaatgtcaggcacagcttattgaaggacttatacattttgtttcaagacaagcgatgaatatagatggtttaggtactaaaattattcatcagctatacgaaaatcagttaatcaaagatgtcgcagatattttctatttgaaagaagaagatttattaccattagagagaatgggaaagaagaaagttgataatcttttattagcgatagaaaaatctaaagaacagtcattagagcatttattatttggactgggtattagacatttaggtgtaaaagctagtcaagtacttgctgagcgatatgaaacgatggatcaactttttaaagtaactgaaagtgaattaattgaaattcaagatattggagataaacttgcacaatctgttgtaacatatctcgaaaatagtgatattcgttcattaattgaaaaattaagtaataaaaatgttaatatgtcatataaaggaattaaaacaactgaaatcgaaggtcatcctgattttagtgggaaaacaattgtattaacagggaaactcgagcaaatgacgagaaatgaagcatctgaatggttgaaaatgcaaggtgctaaagttacaaacagcgtgactaaaagtactgatattgtcatagctggagcagatgcagggtctaaattagccaaagctgagaagtatggtactgaaatttggactgaagcagcatttattgaaaaacaaaatggaatctaa

SEQ ID NO: 9132 - DNA, 2190 bp, Staphylococcus epidermidis
atgaatgcgctagtaaaaaatatgaattcagagcaaagtgaagcggttagaacaacagaaggcccattgcttattatggcaggtgctggatcaggaaagacacgtgtgttaacacatcgcattgcgtatttattagatgaaaaagatgtatcaccttataatattttagctattacgtttacaaataaagcagctaaagaaatgaatgcgcgtgtcgaacatcttgtgggagaagaagcgcaagtgatttggatgtccacttttcactctatgtgtgtaagaattctgagaagagatgctgatcgtattggcattgaaagaaatttcactatcattgatcctaccgatcaaaaatcagtgattaaagatgtattgaaaagtgaaaatatagacagtaagcgatttgagccacgtatgtttattggtgcaattagcaatttgaaaaatgaattaaaaacacctgaggatgctcaaaaagaggcgaatgattttcactctcaaatggttgcaacggtttacaaaggttatcaaagacagttatcacgtaatgaagcactcgactttgatgatttaattatgacaactattaatttatttgaacgtgtacccgaaactctagaatactatcaaaataaatttcaatatatacatgtagatgagtatcaagataccaataaagcacaatataccttagtaaaactattagcaaacaaatttaaaaatttatgtgttgttggtgattctgaccaatctatttatggttggagaggagctgatatacaaaatattttatcttttgaagaggactatcctgaggcaaagacaattttcctcgaacagaactatcgttcaactaagaatattttaaatgctgcaaatgaagttataaaacataattctgaacgtaaacctaaaggtctatggactgcaaattctggaggagacaaaattcagtattatgaagctatgactgaaagagatgaagcagaatacgttgttaaagaaataatgaagcatcaacgcagtggtaaaaaatatagtgaaatggctatattatatagaacaaatgcccaatcacgtgtacttgaggaaacatttatgaaatcaaatattccttatacaatggttgggggtcaaaagttctatgaccgtaaagaaattaaagatttacttagttatttaagagttattgctaatagcaatgatgatattagtttgcaacgtattattaacgtgcctaaacgtggtattggaccttcatctgttgaaaaaatccaaacctatgcacttcaaaataatataagtatgtttgacgcattggctgaggtagattttataggtctctctaaaaaggtaactcaagaatgtatcagtttttatgaaatgattcaaaatttaatcaaagaacaagaatttctcgaaattagtgaaatcgtagatgaagtactacaaaaatcaggctatagagacatgcttgatcgagaacaaagtattgaatcacgaagtcgattagaaaacttagatgaatttatgtctgtacctaaagattatgaggaaaatactcctttagaggaacaatcacttattaattttctaacagatttatcattagttgctgatattgacgaagcagatacacagaatggtgtaacattgatgacaatgcattcagcaaaaggtcttgaatttcctatagtttttattatgggaatggaggagtcgttgttcccacatatcagagcaataaaaagtgaagatgatcatgaaatggaagaggaacgtcgtatttgttatgtagcaattacacgagcagaagagttgctttatatcacaaatgcaacgaccagaatgttgtttggtcgttctcaatccaatatgccatctcgatttttaaaagaaatcccagaagacctacttgatagtcataccggtcaaaaaagacaaactatatatcccaaatctcaacctaaaagaggttttagtaagcgtactacatcaactaaaaaacaagtttcatcatctgattggaaagtaggagataaagttatgcataaagcatggggtgaagggatggttagtaacgtgaatgaaaaaaatggatctgtagagttggatattatatttaaatcagaaggtccaaaacgattattagctcagttcgcaccaataacaaagaaggaggactcatag

SEQ ID NO: 9133 - DNA, 693 bp, Staphylococcus epidermidis; identical to SEQ ID NO: 4428

SEQ ID NO: 9134 - DNA, 303 bp, Staphylococcus epidermidis; identical to SEQ ID NO: 6317

SEQ ID NO: 9135 - DNA, 1296 bp, Staphylococcus epidermidis
atgatagaacgttattcaagagatgaaatgtctagtatttggacggatcaaaatcgctatgaagcatggttagaagtagagattctagcgtgtgaagcatggagtgagttaggttatattcctaaagaagatgtaaaaaaaattcgtgaaaatgccaaagtaaatgttgaacgcgctaaagaaattgaacaagaaacacgacacgatgtagttgcatttacacgccaagtttctgaaactttaggtgatgaacgtaagtgggtacattatggattaacttccactgatgtagttgacactgccttaagttatgtaattaaacaggcaaacgaaatccttgaaaaagatttagaaagatttatagatgtattagctgccaaagctaaaaaatatcaatatacattgatgatggggcgtacacatggagttcatgctgagcctacaacttttggcgtaaaaatggctctttggtatactgaaatgaaacgtaatcttaagcgttttaaagaagtgcgtaaagaaatagaagtagggaaaatgagtggagcagtaggaacatttgccaatattccacccgaaattgaggcttacgtatgtgaacatttaggaatagacactgcagctgtttctactcaaacattacaaagagatcgtcatgcttattacattgctacattagcactaattgctacatcaatggaaaaatttgcagtagaaattcgtaatttacaaaaaactgaaactagagaagtcgaagaggcatttgcaaaaggacaaaaaggatcatcagcaatgccacataaaagaaatccaatcggttctgaaaatattacaggtatatctcgtgtgattcgaggatatattactactgcatacgagaatatacctttatggcatgaaagagatatctctcattcttctgcagaacgtatcatgttaccagatgttacaattgctctagattatgcacttaatcgatttacgaatattgttgatcgactaacagtttatgaagataatatgagaaataatattgataaaacgtatggtttaatcttctcacaacgcgtactactagcattaattaataaaggcatggtacgtgaagaagcttatgataaagttcaacctaaagcaatggaatcttgggaaacaaaaacaccatttagagagctaattgaacaagattcatctataactgacgttctatcaagtgaagaattagatgattgcttcgatcctaagcatcatcttaatcaggtcgacactatattcgcgcgtgctggtttatcttaa

SEQ ID NO: 9136 - DNA, 180 bp, Staphylococcus epidermidis; identical to SEQ ID NO: 4425

SEQ ID NO: 9137 - DNA, 627 bp, Staphylococcus epidermidis; identical to SEQ ID NO: 6314

SEQ ID NO: 9138 - DNA, 828 bp, Staphylococcus epidermidis; identical to SEQ ID NO: 6313

SEQ ID NO: 9139 - DNA, 1470 bp, Staphylococcus epidermidis; identical to SEQ ID NO: 6312

SEQ ID NO: 9140 - DNA, 1068 bp, Staphylococcus epidermidis
atgctaatagataaagcaagatcatttattcagaccatgtatagcgaattaaaatataatactaatgaagttgaaaatagaatgaaagagattgagcaagaaattaacttgactggtagttacacacatacttatgaagaattatcttacggtgcaaaaatggcatggagaaactcaaatcgttgtattggtagactgttttggggttctttaaatgttaaagatgcccgagatgtatgtgacgaaaaagaatttataaaatttatacatacacatattaaagaagctactaacggtggaaaaatcaaaccatatattacaatttttagtcctgaagatacacctaaaatttataataatcagttgattcgttatgctggttatgaaaatgttggcgatccatctgaaaaaaaggttactcgtttagctgaacatctaggttggaaaggtaaaggttcaaattttgatattttacctctgatttatcaattgcctaacgacactataaaaatacacgaacttccaagtgatattgtaaaagaagtttctatacatcatgaacactatcccaagctttcaaaattaggtttaaaatggtatgcggtacctattatttcaaatatggatttaaaaatcggtggtattacttaccctacagcaccttttaatggatggtatatggtaaccgaaattgctgtacgtaatttcacagacacctatcgttataatcttttagaaaaagttgcagaagcttttgaatttgatacacttaaaaataattcatttaataaagatcgagcactcgtagagttaaatcatgctgtgtatcattcatttaaagctgatggtgtttctattgttgatcacttaactgcagcgaagcaatttgaaatgtttgaacgaaatgaacatcaacaaaacagagatgttactggtaagtggtcttggctggcacctccactttcaccaactttaacttctaactatcatcatggatatgataatacaatgcatcatacgaatttcttctataaaaaagaagaacctatgaagtgccctttccattaa

SEQ ID NO: 9141 - DNA, 804 bp, Staphylococcus epidermidis; identical to SEQ ID NO: 6310

SEQ ID NO: 9142 - DNA, 1098 bp, Staphylococcus epidermidis
atgtttatcaatgcaaaagatttcggattaaaaggaaaaagtaaatataaggatacaagagcgattcaaaaagcattaaattacgcaaaaaaaggcagacacactgtttatatacctaaaggaacttattatatcagaaaagctttagttatttatgattctacaacattgttattggaagaaggtgcaacacttttaagaaaagggaaagatgcattattaaaaaatggtagacgcttaaagctatatcatggctataatggaaatagtcacatttatattaaaggaggaacttttgatatgaatggaggcgaatatccatataataatacagccatgtgcatgggacatgcagaagacattcaaattttaggtgtaacattcaaaaatattgttggagggcatgcactcgacgcatgcggaatcaatggtttacacatatcagaatgtgaatttaaaggatttcttgatattgatggagatcgttctttttctgaagcagtacaattggacatacaagtacctggtgcttttcctaaatttggaactacagatggaacgattacgaaaaatgttgtcattgaaaaatgttattttggctgttcagatcatcctaaaatgaaagcgtggaatagagctattggctctcatgccagtagatataactgctattatgaaaacattcatatcaatcaaaacatctttgataatttaaatgagtatgctttaactcctctaaagtcaaaatacacatttattacaaaaaataaatttataaattgtaatggtggaataagatttcttggagtgaaggatggtaaaaatgctgccgatcctattacaggacaagtgatggaaactcaagctggtgagaatttcaatgtgataggtaatacttttattggtaagatgaaaagagatgcgattcatattagaagttatcatcacgtccaacatcaaaacgtttttatagcggcaaatcaatttgaagatgcttcacaatcaatacatttagaaaatattaatggacttactttaaatcaggaacaaacaaaaatcaaaatcaagagtattgatgtgaaaaacatcagtaattaa

SEQ ID NO: 9143 - DNA, 555 bp, Staphylococcus epidermidis
atgagtaacaaagcattaatcattgtagattactcttttgattttattgacgatagtggtaaattaacatgtggcaaacctggacaagaaattgaaacttttattactcagcgtataaaaaattatcataataatcaacaggaaatatttttcctaatggacttgcattatgaaaatgataaatttcatcctgaaagtaaattattccccaatcataatattcatcaaacaccaggtcgtgagttatatggcgaggtaggtagattatacaactcaattaaagaccaaatgaatgtacattatttagataaaacgagatacgattcattctacggtacaccattagatagtttattacgtgaaagacaaatcaatgatattgaaattgtgggtgtttgcacggatatttgtattttgcataccgctgtttcagcatacaatttaggttataacatcactatcccaattagaggcgtagcatcttttaatcaagatggtcatcaatgggcactctcccattttaaaaattctcttggtgcaaaagtagaagattaa

SEQ ID NO: 9144 - DNA, 930 bp, Staphylococcus epidermidis; identical to SEQ ID NO: 6307

SEQ ID NO: 9145 - DNA, 1380 bp, Staphylococcus epidermidis
atgacaataattagagataaatttaacaatagtaaagctttttttaatacgcataaaacaaaaaaccttaaatttcgaaaacaacaacttaaattactaagtaaaaatatcaaaaatcatgaaaatgaattattagatgccttatataaagatttaggtaaaagtaaggttgaagcatacgcaactgaaattggtatgcttttgaaaagcataaagctaatgcgcaaagagttaaaaaattggtcgaaaaccaaacaaacggatacaccactctacttattccctacaaagagttatattaaaaaagaaccttacggtacggtgcttattataggaccatttaattatccggttcaattagttttcgagcctctcatcggagcaatagctgccggaaatactgctatagttaaaccttcagagttaacacctcatgttgccattgtgatcaaggacatcattgaagatacatttgatgaagcatacgtttctgttgttgaaggtggtattgaagaaacccaaacgttattaagtctaccatttgattatatgttctttactggcagtgaaaaagtcggaaaaattgtctatgaagctgcagcaagaaaattaattccagttactcttgaacttggcggtaaatcacctgtcattgtcgatgatacagccaatatcaaagtagcgagtgaacgtattagttttggtaaatttactaatgctggtcaaacatgtgtcgctccagattatatattagttcagcggaaagttaaaaatgatttaataaaagctcttaaaaaaacaattactgaattttacggagaaaatattgaaaaaagccctgatttcggacggattgttaatcaaaaacactttaatcggttgaatgacttgattcaaattcataaagataatgttgtttttggaggtaatagttctaaagaagatttatatattgaacctactttattggataacataaccaatgacaataaaatcatgaaagaagaaatattcggtcccattttgcctattattacttatgataatttcgatgaagtacttgaaatcatccaaagtaaatcaaaaccactaagtttgtatctttttagcgaagatgaaaacatgacacatagagtggttgaagaattatcatttgggggcggtgcaattaacgatacgttaatgcatttagctaatcctaacttacctttcggtggtgtaggttcttcaggcataggtcaatatcatggtaagtattcttttgatacatttagtcatatgaaatcatacacatttaaatctacacgtctagaatcgagtttatttttccctccatataaaggtaaatttaaatatattaaaaccttcttcaagaactag

SEQ ID NO: 9146 - DNA, 1029 bp, Staphylococcus epidermidis
atgacattaggttatataggttcttatactaaaaagagtggtaaaggtatatatcgcttcaaactaaatgacgaaacaggagttattgaagcgttagaaactggttatgaaattgaagcgtcaacttatcttactcgtaatgaatcgtttttatatgcgattactaaagaaggtgaagaatgtggtgtagctagttttagtattaaagaagatggacaactggaattaattaataaatgtctagcatcaaaacagggaactggttgttacattcaagtgtctagtaatggtaaatatttatttgaagcggtttatggtgcaggacttgcaaggatttataaattaaatccaattacgggagcaatagagaaattaatagaagaacttgagcatgaatttccaactggctcacatgaaagacaagattcatcacatgttcattttttaaatgaaacacctgatcataagtatgttgtagctactgatttaggtacagatagagttgtaacatacaaatttggtgaggatggtttaaaacaatatgcagtttctcaattcaaaaattcagacgggcctcgccacatcgcttttagtaatgatggacgacacgcgtatatcgttcacgagctatcaaatgaggtgagtgttacagaataccaagacggtaagttcattgagctagagagacattcaactattccaagtgactttaacggggaatcgaaattagcagcagtgagactatcacatgatgggaagcacttatatataagtaatagagggcatgatagtattgctatatttgaagttttagaagatggcagatcactgagaagtattgaaatacaaccaagttacgatgcctttccaagagactttaatataactgaatcagataactatttaatttgcgcacatcaagaaggagaatcaaaagtttcaatttttgagcgtgataacataactggtaaactttcattaaaagataaaaaagctatagcaaatgaaggtgtttgtgtactactataa

SEQ ID NO: 9147 - DNA, 399 bp, Staphylococcus epidermidis; identical to SEQ ID NO: 6304

SEQ ID NO: 9148 - DNA, 171 bp, Staphylococcus epidermidis; identical to SEQ ID NO: 6303

SEQ ID NO: 9149 - DNA, 1041 bp, Staphylococcus epidermidis
atgcaaaaagtacgttctgatataatgactcatcgtggttctcactatgatttaggagtaaagactgctctttggttacaaaccactcctttattaaaaaatcgaaataaagaatggcgaaagagaattccacgttttgatattgatgtcaaggaaacctatgatatatttcaaatctattcgccacagatttgggaagaaataattggtatgcaagatgtattgaatctacctacaaaacaaatgattttaaattttggccattatcgatttactgatttaaaggacagtggttgcacagtatataaaggtcgtgattttttagtccgaaattatgattatcatcctgcaacatatgatggtagatacttattatttcaacctaatgacgggggattatctcaaataggaccgacttcaagagtgactggtagaatggatggtatgaacgagtatggtttagttatggcatataattttatgcatcgtaaaaagcctgcaaatggatttgtatgttacatggttggtcggctaatacttgaaaattgcaaaaatgtaactgaagcaatcaaatttttaaaggaagtaccgcatcgtagttcattcagttatatactaatggatagacattcgaattatgccattgtcgaagttacacctcgatcaatagatgtaaggtatgaacatatatgcacaaatcattttgaattgcttacccatgaaaatagaaactatacaagagaatctaaagaacgcttaaatcgtgtaataaataaaacaactccttctacaaacaaagatatcgcattcaaattatttaacgacccgcaatacgaaatctatagcaacctatttaaaagttggtctggtacaattcatacttcactatatgaacctaattcattaatagcatggatggcattaggtcaaaacagtcatccaacctcaatcaatttttctaattggttaaaaggaaagaaattgaatataaattactttgaaggcgaaatagatacaccattaacttttgccacatactaa

SEQ ID NO: 9150 - DNA, 837 bp, Staphylococcus epidermidis
atgaaaaagctttttattagtggtttaatcatatttattattttctttgctagtggtgctatgacttggtttactatagataaaaataaatacgataatcgacattataccaaaacaataaatagcaaaattgaacatttatctataagtacagtaacaaccaatgttaatgtaatttctggaaaaaaattagctgtttattttactggagataataaaataaatgttacaaaaaataataaaaggttaagtattaaagaaaaacgtgcagtagatagaggatatggattaaattttaatccatttcactcaaacaatagaaagttaacaattgttgtaccagaaaaagaccttaaatctcttaatattcaatcgttattgggagaaattgatttaaatcaagtgaatttgaaacatgtttcattggaaacagatagaattatacaacttaaacgatctgaactcaatcaggtaaacatcgaatcttctaaagcaaatttttatattacagactgtttaatcagggaaggtcgtatgaagcttgataagggtataactcatgttaaaaatagtacattaagtgatactgttttcttggttaatagaggagatatttctatgacggacatgaaatctaacaatgatataaaagcttctacacaaagaggtaatattaattatcattttggcgaaaaacctaaaaacactttgcttaaacttcatcctggtcatggaaataaagaaattaaaaatcgatatttcgataaaggaaaagtgggaaatagcgataatatattggaattttacactgtagatggcgatattaaaattgaataa

SEQ ID NO: 9151 - DNA, 558 bp, Staphylococcus epidermidis
atggataaaataaccttcttaaatgaattagaattagctttagatgatttacctagagaagaaaaagatagtattatgcacaagtatgaaaacttgttctatgaagaagaattgaaagggattagtgaatcacaaattataaaaaagttaaatgatccttatcatatttccaaagaagtaaaagctagaagtgctattcattatgctagttacaaaccaaccttagcaaacatagtaagagcaatactagcatcgttaagtcttggtattttgtcgttatttattattttaataccggttgttatcattgcattacttattctattctgtttccttatttctatttgttttatctttgcaccatttgttttattattttattcagtattacatggtttcgaaaatgctataagcaatgtgtttttttcaatttcttttacaggtttaggaattatgtttattgttattactttgaaaattggtgaaataattcataaacttattttgaaatatcttctttggtatataaaaactgttaaaggaagcgttaaagaatga

SEQ ID NO: 9152 - DNA, 486 bp, Staphylococcus epidermidis; identical to SEQ ID NO: 4399

SEQ ID NO: 9153 - DNA, 294 bp, Staphylococcus epidermidis
atgatgaacattccaatattaaagcatactattgaatttctgaacatcaaagcaagagtatttcatagagatgatgatacacatctgattgatcaatatttaacaaatggtaaatcaagggctatccctatctttgtcttcatgaacgattcattcgaacaattgacagtttggagaccaagagcaaaagaagtacaaaattttgtcaataaaattagaagtaataaattgccagataaaacccatcctaattttgatttttactcaataattaatcaacttttatataaataa

SEQ ID NO: 9154 - DNA, 732 bp, Staphylococcus epidermidis
atgaagagcttacaattagtcaaatatgatttaattagtatacttaaaagtccgtatacttatttagcatttatacttgtaattggaatgacggtattccaagctagcatgatggcaaattatagttctgcacataaagttaatatagatatggtttttaatttagctaattggcttttcttgtttgctggtcttttattcattataaaaacaataacaagagattactcacaaggtactatacaattgtttatgagcagaataactagcagaatgggctatatcattactaaaacagtatctattgtattaatttcattcttatttacaattattcactacttggtaataattattatacaatctacaactaaaagtgaaaaaatggatggagatagatttttaaataatatttggttttaccttattttctttttattctttggattattcttattactaatcactttaatagtagaaaaacctgctgtcatatttactctaggtattttcttaatactcatcgttccgtttattcagccatttattccaatgattccgaatattggcgatgatattcaggattcatttaaatatataccatttacgtatttaactgaaaaaatgactggtgagattaaattctctaattggcaatggtttatctctattgcatcaatagtggtcttatttattgcaaatatgttatatgcatcaaagagggatatttaa

SEQ ID NO: 9155 - DNA, 873 bp, Staphylococcus epidermidis
atgaaattacaacatattaccaaaaaatatggtcaaaatactgttttagacgatatagattttgatttcggcgagagtcaaatcgttggtcttatcggtaaaaatggagttggtaaaacaactttgatgaaggtcatgaataataacatcattaactatcaagggaaagtcgacatgcctaaaagtgagaatgttggttatttaattgagcatcctaagttatatggaaacaagacaggtttatttaatttaaaattatttgcacaagtattaggcgatggtttcgataaggaatatgcaaatcatattattgaagcttttggaatgaaaccatatatcaagaaaaaagttaacaaatattcaatgggaatgaaacaaaaattatcaattgcagtttcattaatgaataaacctaaatacttaattttagatgaacctacaaatggtatggatccagatggttcgatagatgtattaaagacaattcaatcacttgttcaacaattagaaatgaaaatattaatctcaagtcataaattagaagacattgaattgatttgtgatagagcagtatttcttagagatggtaagttcgttcaagatgtagatatgaaagatgggggaccagaagatagtactattcttactttacaaaaagatgactttaataaagctttagattctctttctgaaaactttaaagtacagcagtctcaaaaagaatcgggagaaattatcattaaagctcaaaatgattatagagagttacttaaatcgttatcccaactagatatttatccaaaatatattgaaacacgtaaaagttcactacgtgatacttactttaatattaatcaaagaggtgataaataa

SEQ ID NO: 9156 - DNA, 648 bp, Staphylococcus epidermidis
atgattagaaacttaaaattacgtagttggacactaattatttacgcattattgcttttattctttccgatttatcatttgttaaataaagatacaccactatattcaattatctcaggaccaatcggattaatactgacgatgatatgtttgatagatataggtcatttattcagagttaatcgtagattaggtggttcatcttcatattatttcttttatagtttgcctgtatcaaagagagatttgcttaacgctaattacatgacatgcattttattaacttttataggtgcgcttatcattagtttatatggatacaacacaagcacaataaaaacagattcgatttatttttcgacgactttttcattcatagtagggaatttcttttctatacctatagcgtttagtaagagtactgaacgtaaagatcgagatattccatatatagcttatattgtaggaattatggtggttctgccatttactttatcggtcatttttatcttaatcaattatcttacacacaatgatagccacatcccaatgatatactcatatttcttaaattatggtctattatttgtaagtagcattttcttagtcattaattatttgattcaaattaaaaaaataaagtattaa

SEQ ID NO: 9157 - DNA, 915 bp, Staphylococcus epidermidis
atgaacgcgatagaacttaaagatgttaattatcgatctaacgcatttcaattgcaagatgtctccttcaatgttcctaaaggatatgttacaggttttataggtggaaatggtgcggggaaaactacaataatacgattaattatggatttaattcaatctgaaagtggtacaatctctgtttttgagaaagatataaaaattcatcctcgtgaaataaaaaataaaattggatttgtgtattctgagatttattttaatcaaaaatggacagtaaaaaaattagaaaatatcattgcccctttttatgatcgttgggatcatgaaatatttataaagtatttaaaattttttcagctgccatataaaaataaaataaaaactttctcaaccggtatgaaaatgaaactatcgttagcaattgcattcagtcatcatgcagaattatttatcttagatgaaccaacttcagggttagacccattaataagaaatgaattacttgaaattattcaacaagaattgatagatgaaaataaaacagttttcttttcaacacatattatttctgatttggaaaaaattgcagattatatcgtttttctcagtgagggtgaaatcatattcaatgagtctagggataaactatcgcaaaaatacaaaatcgttagtggttctaatgaagacttagatgaagagttggacgaacttttgatttacaaagaaagtaagcaaacaggctatattggtttaacagaatattatcaaacatttaatgaattgtttggtagtggtgttgaaataaaagatgcatctatagaacaattgatgatttatttagaaaaaagtaaacataaacgaaatacaaattcaaaatacaaagtgagatttaactatgaagcaattaatgattag

SEQ ID NO: 9158 - DNA, 378 bp, Staphylococcus epidermidis; identical to SEQ ID NO: 4393

SEQ ID NO: 9159 - DNA, 171 bp, Staphylococcus epidermidis; identical to SEQ ID NO: 4392

SEQ ID NO: 9160 - DNA, 1290 bp, Staphylococcus epidermidis
atgatgaatccattagcccaaaaattgaatgatgaaataaagcaatcaagtccagaagtattagatatgatgtcacatttaggtaaagatatgttttatccaaaaggaattttatcgcaatctgccgaagcaaaacgcacaacatataatgctactattggtatggcaaccaaaaaagaaggtaaaatgtacgcaaattcacttaaccaaatgtttaatgaccttacaccggatgaaattttcccatatgcacctcctcaaggtgtagaggaattacgtgatttatggcagaaaaaaatgcttaaagaaaatcccgacttaaagtctaaatctatctctcgtcccatcgttacaaacgcgctcacgcacggtctttctctagtagctgatttatttgtagatacagatgataccgtcttattaccgacacacaactggggcaattataaacttgtatttagcacacgtcacggtgctcatatcaatacgtatcctatttttgatgactcaggtcacttcactacatctgaacttgtaaaaacattaaaagaatataaaaaagacaaagtgattattattttaaattatcctaataacccaactggttacacaccaaataaaaaagaagttaatactattgtaaatgcaattgaagaactagctaataaaggtactaaagtagtaactgttgtcgatgatgcatactatgggttattttatgaagaagtttaccaacagtcgattttcacggctttaacacaggtgaaatcttctaaccttttaccagtgcgtttggatggagctactaaagaattcttctcttgggggttccgagttggctttatgacgtttggaattgatcatgaaacgttaaaaaatgcgctagaagctaaagtaaaaggattaattcgtagcaatatttcaagttctccactaccttctcaaagtgcaatcaaacatgtacttaaatatcatgagcaatttgataaagaaatcgatcaaaatatcaatattttaaaagaacgctacgaagtaactaaacaagtggtgtatgataataaatatgccaaatattggcaagcctatgactttaattcaggatactttatgtcattgaaattaaatcaagttgatccagaaaaattacgtaaacatttaattaataactattcaattggtattattgctttaaatagcacagatattcgtattgcctttagttgtgtagaaaaagaagatattccttatgtctttgaatctattgctaatgcaattgatgatattaaataa

SEQ ID NO: 9161 - DNA, 1032 bp, Staphylococcus epidermidis
atgaaagacatcaaacctaataattcgaaattaatacaaacatatttaagtaagaaaactataagatatggcacagcaagtgcattaacattggcactctatttatttaacagtaacgtaactgcgtatgcgaatgaaaatactgcaaatcaaaatcaagaaacatcaccaaaaacttcacaaacagcacctataagtaataaagaaaatacagattcaacagctgtaacaacagatcaaaataataatgatgaagaagaatacgatgcgtcatatgaattaccaattctttatgtaactgtctggctagatgatcaaggaaatatcattaaagatgctgtggaagatgctaaaacccctgcttcagaaaggcaaccggtgaaaattcctggttaccaacattatagaacctctgtgagtgacggaatcactaaatttatttatcgtaaaattagcacagcacaatcacctatagttgaaaataatcaacaagataataatacaaataaagttgttgaaacaaccaatcaaaataaagatgaagtgaatgaaaaagaacaaaatcaagcaaatacttcagtaacaaatacacaaattaacaaaaacgagaaagatgaagacacaaatacaccacagaaagataaagacgagaaagacacaaaaactccgaagaaagatagagaggagaaaaaaccagtaataccaaaaagcggtaaagacgagaaagaatctaaagacagaaaaacaccaaaaaaagacaaaaaagagaaaatcacaaaaactccgaagaaagatagagaggagaaaaaaccagtaataccaaaaagcggcaaagacgagaaagacacaaaaataactaagaaagacaaagaagacaaaattacaacaacttccaagaaagataataacaatgatgtacaagataaattaccggaaacaggtaaaacaaacgatattcaaaatcctgctttaataatgttacttgctggtttaggtttattaggattatttagaaataaaataagagaatag

SEQ ID NO: 9162 - DNA, 1620 bp, Staphylococcus epidermidis
atggcaaaagatcttaaattctctgaagatgcgcgtcaagcaatgttacgtggtgttgataaattagcaaacgctgtaaaggttacaattggacctaaagggcgaaatgtggttctagataaggattacacaacacctttaattaccaacgatggtgtaacaattgctaaggaaatagagttagaagatccatatgagaatatgggtgcaaaattagtgcaggaagttgcgaataaaacaaatgaaatcgctggggacggtacaactacagcaacagttttagcacaatcaatgattcaggaaggtcttaagaatgttacaagtggtgcaaatcctgtaggcttaagacaaggtattgacaaagcagtgcaagtggctatagaagcgcttcatgagatttctcaaaaggttgaaaataagaacgagatagcgcaagttggagctatttcagcagcagatgaagaaatcggtcgctacatttctgaagcaatggataaagtaggtaacgatggcgttatcactattgaagaatcaaatgggtttaatacagaattagaagtagttgaaggaatgcaatttgatcgcggttatcaatcaccatatatggtaactgactcagataaaatgatagctgaattagaacgtccatatatattagtaacggataagaaaatttcatcattccaagatattcttccattattagaacaagttgtgcaggctagtcgaccaattttaattgttgcggatgaagtagaaggcgatgcacttactaatattgttttaaaccgtatgcgtggaacatttactgctgtagcagttaaagccccaggatttggtgatcgacgtaaagcaatgttagaagacctagcaatattaactggtgctcaagtcattactgatgatttaggtttagaacttaaagatgcatctcttgatatgctaggtactgctaataaagttgaagtgactaaagatcatacaacagtcgtagatggtaatggtgatgaaaataatattgatgctcgtgtaggtcaaattaaagcacaaattgaagaaactgattcagagtttgataaagaaaaattacaggaacgtttggcaaaactagctggcggcgtagctgttatcaaagtaggggctgcaagtgaaacagagcttaaagaacgtaaattaagaattgaagacgcattaaattcaacacgtgcggcggtggaagaaggtatcgttgctggtggtggtactgcgttagtcaatatatatcaaaaagtaagtgaaattaaagcagaaggtgatgttgaaacgggtgttaatatcgtattaaaagcattacaagcacctgttagacaaattgctgaaaatgcaggattagagggttcaattattgttgaacgtttaaaacatgctgaagcgggcgttggtttcaatgcagcaacaaatgaatgggttaatatgttagaagaaggtatagtagatccaactaaagtaactcgttcagcgttacaacatgcagcaagtgtagctgctatgttcttaacaactgaagcagtcgttgctagtattccagagccagaaaataatgaacaacctggaatgggtggcatgccaggtatgatgtaa

SEQ ID NO: 9163 - DNA, 285 bp, Staphylococcus epidermidis
atgcttaaaccattaggaaatcgtgtgattattgagaagaaagagcaagaacaaacaactaaaagtggcatcgttttaacagatagcgctaaagaaaaatcaaatgaaggtgtgatcattgcagttggacaaggtcgtttattagacaatggcacacaagttgctcctcaagtcagtgaaggtgatacaatcgtcttccaacaatacgcaggtactgaagtaaaacgtggcgacaaaacatatttaattttaaatgaagaagatatattagctattatagaataa

SEQ ID NO: 9164 - DNA, 741 bp, Staphylococcus epidermidis; identical to SEQ ID NO: 4366

SEQ ID NO: 9165 - DNA, 1365 bp, Staphylococcus epidermidis
atgaaaaagtttaacattaaacattcatttatgcttacgggctttgctttcatggtaactacatcattattcagtcaccaagcacatgctgaaggtaatcatcctattgacattaatttttctaaagatcagattgatagaaatacagctaagagcaatattatcaatcgagtgaatgacactagtcgcacaggaattagtatgaattcggataatgatttagatacagatatcgtttcaaatagtgactcagaaaatgacacatatttagatagtgattcagactcagatagtgacttagattcagatagtgattcagattcagatagtgattcagattcagacagtgactcagattcagatagtgactcagattcagatagtgactcagattcagacagtgattcagactcagatagtgactcagattcagacagtgattcagactcagatagtgattcagattcagatagtgattcagattcagacagtgactcagactcagacagtgattcagattcagatagtgattcagactctggtacaagttcaggtaagggttcacataccggaaaaaaacctggtaaccctaaaggaaatacaaatagaccttctcaaagacatacgaatcaaccccaaaggcctaaatacaatcaaacaaatcaaaacaatataaaccataatattaatcatacacgtactagtggagatagtgcgccttttaaacgtcaacaaaatattattaattctaacttaggtcatagaaatcaaaataatataaatcaatttatatggaacaaaaatggcttttttaaatctcaaaataataccgaacatagattgaatagtagtgataataccaattcattaattagcagattcagacaattagccacgggtgcttataagtacaatccgtttttgattaatcaagtaaaaaatttgaatcaattagatggaaaggtgacagatagtgacatttatagcttgtttaggaagcaatcatttagaggaaatgaatatttaaattcattacaaaaagggacaagctatttcagatttcaatattttaatccacttaattctagtaaatactatgaaaatttagatgatcaggttttagctttaattacaggagaaatcggctcaatgccagaacttaaaaaacctacggataaagaagataaaaatcatagcgccttcaaaaaccatagtgcagatgagataacaacaaataatgatggacactccaaagattatgataagaaaaagaaaatacatcgaagtcttttatcgttaagtattgcaataattggaatttttctaggagtcactggactatatatctttagaagaaaaaagtaa

SEQ ID NO: 9166 - DNA, 786 bp, Staphylococcus epidermidis
ttgaaaatccaaatacttcaattcaatgtagaacgtggaaatgttgataaaaatatgcaaaatatcaaaactaagtttaatcaatacttagataaagataccagtgtcgtcgtgcttccagaaatgtggaataacggttatgcattagaagaattagaacaaaaagctgataaaaatcttaaagacagctctctctttataaaagacttagcacatacatttaatgtagatatcattgcaggttcagtatcaaatataagagaaaaccatatatataatactgcttttgcaattaataaaaacaaagaattgattaatgaatatgacaaagtacatctcgtgccaatgttacgtgagccagactttttatgtggtggaaatgtagtccctgaacctttttatttatctgatcaaacacttgtgacgcaaatcatttgttatgacttacgatttccagagatattgcgctatccagctagaaaaggtgctaaaattgctttttatgtagcacagtggcctagctcaagactagatcattggttatcattactaaaagcgagagcaatcgaaaatgatatttttattgtagcttgtaatagttgtggtgatgatggtcacaccaattatgctggaaattcaattgtcattaatcctaatggtgaaattttaggccatttagatgataaagaaggtgtactaacaacacatatcgatgtagacttagtagatcaacaaagagaatatattccagttttcagaaatctaaaaccacatctttataaatag

SEQ ID NO: 9167 - DNA, 585 bp, Staphylococcus epidermidis
gtgaaaatcatcgataaaaaaattgagcaatttgctcaatatttacaacgtaaaaataacttagatcacatacagtttttaaaaattcgtctaggaatgcaggtactagcgataaatattgaaaagtctatagttgtgtatgggctagcaataatctttcatactttcttttacacacttttaactcatttaagttattttttaattaggagacatgcacacggtacacatgcaaattcgtcattgttatgtcatattcagaacataattttctttattatttttccatacttaataataaagttagatattaactattttgttcttttatctatggcattagtcggattaattattacgattttatacgcacctgcagcaactaagaaacaacctatacctagacgtcttgtaaagcgaaaaaaaatactctccatatttttatattgtactatcgtagttatttcattagtaactaaagaaccggtaaataaacttattttattcggtgtaattttagaatctttaacattactacccatctttttccctaaggaggatattaatcatggaaaacatttttaa

SEQ ID NO: 9168 - DNA, 141 bp, Staphylococcus epidermidis
atggaaaacatttttaatttatttataaaatttttcactacaatcttggaatttattggtactgtagcaggagatagtgtatgtgcttcttactttgacgaaccagaagtgccagaagaactgactaaactatacgagtaa

SEQ ID NO: 9169 - DNA, 783 bp, Staphylococcus epidermidis
atgcgaggaaatgatacacttaaattatatgccatcttgttgatgggtattatggtttttttaagtgtagtgattttagtgatgtccaattttacacttcgtgaaatgaggtataaacgtaatgtaaaagaaatcgaagcatattatgaatacacgttacgtatagaaagcattaacaatgaaatgcgtaagttccggcatgattatgtgaatatcctcaccactctttcagattacattagagaagatgatatgcctggattacgtaaatattttaatgaaaatatcgttccaatgaaagataaattaaaaactcgctctattaaaatgaatggtattgaaaagttgaaagtgagagaaattaaagggttgattactactaaaattattcaagctcaagaaaaacgtattccaattagtattgaggttcctgatgaaattgatcgtatcgatatgaatactgttgagcttagtcgtattatcggtattatagttgataatgctattgaagcttcagaaaatcttgaggaaccactcataaatatcgcattcatcgataatgaggaagctgtcacttttattgttatgaataaatgtagtgatgatattcctaaaattcatgagttgtttgaacaaggtttttctactaaaggtgataatcgcggtttaggtttatcaactttaaaagaactgacagactcaaacgagaatgttttattagatactgtcatcgaaaatggttactttgtacaaaaagtagaaataaataataaggaatcataa

SEQ ID NO: 9170 - DNA, 717 bp, Staphylococcus epidermidis
atgaaaatttttgtttgtgaagatgaccaaagacaaagagaacatatggtatcaatcattaaaaactacataatgattgaagaaaagccaatggagttagccttagcaacaaatgatccttatgaggtcttagagcaatcaaaagaacttaatgacattggttgttacttccttgatattcaattagaagctgatatgaacggtattaaattagccagtgaaattcgtaaacatgatcctgttggtaatattatatttgtaaccagtcacagtgaactgacttatttgacgtttgtttataaagtggctgctatggattttatttttaaggatgatccatctgaattaaaaatgagaatcatagattgtcttgaaacagcacatacacgactcaaattattatcaaaagaaagtaatgtagatacgattgagttaaagcggggaagtaattcagtatacgttcaatatgatgacattatgttttttgaatcatctacgaaatctcatagactcatcgcacatcttgataatcgacaaattgaattttatggaaatttaaaggaattagcacagcttgatgaacgtttctttagatgtcataacagttttgtgataaacaggcataatattgaatctattgattcaaaagaacgtattgtttactttaagaatggcgaaaattgtttcgcttcagtacgtaatgttaaaaaaatataa

SEQ ID NO: 9171 - DNA, 960 bp, Staphylococcus epidermidis
atgagacgtctatttgctattggagaggcattaattgatttcataccaaacgtaacacattcaaaattaaaagatgttgaacaatttagtcgacaagttggtggcgcaccgtgtaacgtagcggctacagtaagtaaattaggtggaaaatcagaaatgataacacaactaggaaatgatgcgtttggtgatatcattgtagaaacaattgaacaacttggcgtaggtacgcaatatattaagcgaactaataaagcaaatactgcattggcatttgtcagccttcaagatgatggtcaaagagatttctcattttatcgtaaaccttctgcagatatgttatatcaacctgaaaatattgatgatattcaaatattccaagacgatattttacatttttgttctgtagatttaattgagagtgacatgaaaaatgcccatgagaaaatgattgaaaaattcgagtcagtaggtggtactattgtttttgaccctaatgtacgcttacctttatgggaagataaactcgaatgtcaacgtacaataaatgcgttcatacctaaagcacatattgttaaaatatctgatgaagaattattgtttattactggtaagaagaatgaagatgaagcgattcaatctttatttaggggtcaagttaatgtagtgatttatacacaaggagcgcaaggtgcaactatttataccaaagatgattatcgtattcatcatgaggggtatcaagtacaagcaattgatacaactggtgctggtgacgcatttataggtgctattatttattgcatactcgagtctcggcattctgaatgtaaagatttatttaaggaaaaggggaaagatatactagcgtttagtaatcgtgtcgcagcacttacaacaacgaaacatggtgctattgaaagtttgccgacaaaagaagatataaaagactattattga

SEQ ID NO: 9172 - DNA, 1473 bp, Staphylococcus epidermidis
gtggagtggactcgtgaagagagataccaacgtattgaggatgttgatgaaacatatcttgagcaactgaaacaccaagtggatacatctttatatagacaaacatttcatatccaacctgaaatgggtttattgaatgatccaaacggactcatttattatgaaggatactactatatttcacatcaatggtttccgttaggtgctgtgcacggtttaaaatattggtttaattataaaagcaaagatttattacattttgaacctcaaggaacacttcttaaacctgatactaagtatgatagtcatggcgtatacagtggaagtgcttttgaatatcaaaatcatctttattatatgtatacaggcaatcatcgtgaccaacattggaatagaatttccagtcaaatgattgccagaatgaacaaagacggaaaaatagagaagtttcctaaacctgtgattcatggacaacctgaagggtatacaagtcatttcagggatccaaaggtatttgaaaaaaatagtcaactgtacgctattctaggtgctcaaaatgaaaatgagatggggcgtttacttttatatcgtagtcaagatgttgttgattggcattttgaaggtgaaattaaaactaatctgacacaatttggttatatgtgggagtgtcctgattattttagactaggcaataaagatgtcatactcatgtgtccacaaggcgttgaagctgaaggagataaatatagaaatatctatcaatcagggtatatgataggagatttaaactttaataatctatttttcgaccatgaaagttttcaagaattggataatggttttgatttctacgcgccacaaacgtttgttgatgcagacgggcaacgcattttaattggatggatgggactaccagatacagagtatcctacagataaagaggggtgggcacattgccttactattcctcgagtacttaccattgaaaatggaaaacttaagcagcgaccttttaagcagttagaagatttaagaactaataaagaaacagctttgggatatgctaataaatttaaacgtaaattacatccatatgaaggtaagcagtatgagatgattatagatatattagaaaatgatgcttcagaaatatattttgaattgcgtagctctcgatctgaatctacactgattacttataataaacacgaaaataaactcactttagatcgtaccgatagtgggacactaccatcaaatgtcgatggaacaacgcgttctaccattttagattcaccattaaaacagttacaaatttttgtggatacatctagtatcgaaatattctgtaatgatggtgagcgtgttttaacctcacgtattttcccaaatgaggatgctacaggtataaaagcttcgactgaatctggtcaagtatatttaaaattcactaaatatgaattaaaagggtga

SEQ ID NO: 9173 - DNA, 600 bp, Staphylococcus epidermidis
atgaaaaatatatcagatatagcaaaattagctggagtatcgaaaagtactgtttcacgctttttaaataatggatctgtgagtccagcaacgaaagaaaaaataactaaaataatagaagaaaataattatcagccaaatcaatttgcacaaagcttaagagctcgacgtaccaatttgattggagcaattattccgcgtatgaattcatacgctgttgacgaaacgattaagggtttggtacaccaatgtaatcaacatcgatatcagttattattaaattacacaggattaaaaatagatggtgaaatttcggcactaaaaacattatcacgtagtaaagttgatggaatcgtgctaatggcaacacatattactgaagcgcatattgaagtcattgagaaaattgatgttcctgtcattatagtaggacaagaacacgaccgattatatagtatatatcacgatgattatgaagctggatataaaattggagtactcattggtgaaaaagttgtcgaaatgtacatttctttggcgttagtgaagaagatattgcagttggtattcaacgtaagctgggagttattcaagcgctga

SEQ ID NO: 9174 - DNA, 1251 bp, Staphylococcus epidermidis
atgaatatgaatgatacaatatttctatttttatgtactctattagtatggttaatgacaccaggtttgagccttttttatgggggactcgtacaatcaaaaaatgctttaaatactgtaatgcaaagtatggttgccattgtcattgtcacatttatatggataatgattggtttctctttaagttttgatggaggtaatcaatggataggtggtttgaaatttttgggtcttcatcatgttggttttgaaacttcaaaaactttgagtcctcatatacctctctcattatttatgttgtttcaaatgatgttttgtacaattgcggtatctattttatcaggttcgatagccgagaaaatgagattcattccttatctgatttttgtgagtttatgggttctattaatttatagccctgttgcccactgggtatggggtggtggttggattagtaaaattggagcaatagattatgcgggtggaacagtagttcatataacatcaggtgtatctggtttggttcttgggataatgataggtataggtaaaaagaaagaaaaacatactccccataatctattaattacacttataggtggtatattagtatggttaggatggtatggatttaatgtgggcagtgcatttacattcgatcacatagccatgatatcgtttgtaaatacagttattggtgcaagtgcaggtgctttcggttggttaatctttgaatatatcttgaaaaagactacaagtttactaggtcttttatctggagcgctctctggtcttgtcgctattacaccagcagcaggatacgtcagctatatgagtgccatgattattgcaataatgggtggcataggttgctatatcgttataaatttaattaaagtaaaactccaatataatgatgcactagatgcatttggtattcatggtgtaggtggtatcttaggagctgtgtttacaggagtttttcaatcacatcaaattaatagtgcggtggagaatggttttatctatacaggtgattttaaaatagtagtgattcaacttggagcggcaattgcgactgtcgtttttagcgcaatagtcacttttttgattgctagatttattaaaatttttactcctttagctacaactcaagaagaagataaaacaggactcgatgttatagtacacggtgagaaagcgtatttctatggagagctaaataagtttaatcgtcatattaagttttaa

SEQ ID NO: 9175 - DNA, 225 bp, Staphylococcus epidermidis
atggtatacgaattaggaacagtagggatggtttgtccatttcctttaatagaagcacaaaagaaaatgaatgaattaaatcaaggggatgaattgaaaatcgatttcgattgcacccaggctacggaagcattacctaattgggctgcagaaaatggatatccagttacaaactatgagcaacttgatgatgcatcatggacgattactattcaaaaggcataa

SEQ ID NO: 9176 - DNA, 1053 bp, Staphylococcus epidermidis
atggtgtggacaattataagcggattagtcgttggcatattgctaggatttgtaatgcagagaacaagattttgtttagctggtggatttagagatatgtacgttcaaaagagtaacaaaatgttttatgcattgcttattgctattacagtccaaagtattggtttacttattctaaagaacttaaatattatagaggttccagcagaaacatttccagttataggaactattttgggatccttcgtttttggaatagggatagtattagctggaggatgcgcgacaggaacttggtatagggctggtgaagggttaattggaagttgggtggcattaatattttatgcattgacttcagccgtaactaaaactggggtacttcttccaataatgaatcaaataaataaaccgacgcaagtcagcacaagtatgacgagtacaacaggtataccacaatggattctcgtcatgttattaactgtaattacaatatttttagttgtgaaaacaattcgaaaacctaaaataatggtgccccaacttaaacaaaaatatagtggtattagacattacctatttgaaaaaagatatcatccatttgttgctggcattgcaataggttttattgctctacttgcttggcctatgagtgaatctactgggagaatgggtggcttaggtataacaacaccatctgcaaatcttgtaaattatcttatttcaggagatttaaaatttattgattggggtgtgcttttggtactaggtatattcataggttcttatatagctgcaaaagggtctaaagagtttagatggagattgccagatattaagacaattcgcaatagtgcgcttggtggtatatttatgggatttggtgcttcagttgcaggtggttgctctatcggtaatggtttagttgagacagctacaatgagttggcaaggatggattgctttagcctctatgattattggtgtttggtttatgagttattttatttttgtaaaacctatgaaaaagttacaacaagtatctcaaagctaa

SEQ ID NO: 9177 - DNA, 636 bp, Staphylococcus epidermidis
atgccagatgattttaaaattcctcgcgctacgttaaaacgtctacctttatattaccgattggtcagtattttgaaaggtaaaggtatagatcgtgttaattctaaaacaataagtgaagcactacaaattgattcagctacaataagaagagacttttcatactttggtgaattaggaaaaaaaggatatggatataatatagatagtatgcttgaattctttaaatcagaattaagtgagagcgatcaaattaaaattgccattataggtatcggtaatttagggcgtgcattacttacatataacttttcaatacatgatgagatgacaattactgaagcttttgatattagaccagatattataggtgagaatatcggtgacgttgtggtaaaacatagtgatgatatcaaaacgacattagaatcagaagatattgatgtagtcattttaacaacaccagataatgtggcacaacaagtagctgatgaacttgttaaagccggtgttaaaggtatactaaactttacgccacgtcgaattaaaacaccccaagatgtccaagtacatcatattgattttggtatagagttacaatcattattgttcttcatgaaaaattatagtaaataa

SEQ ID NO: 9178 - DNA, 1935 bp, Staphylococcus epidermidis
atgatacttttacaacttaatgacatctccaaatcgttcgatggtgaagatatcttcacagatgttaattttgaggtgaaaactggcgaaagaatcggcgtagtaggccgtaatggagctggtaaatcgacattaatgaaaatcatagcaggtgtggaaaattacgatagtggtcgaatatcaaaaatcaaaaatttgacaatgagttatttaactcagcaaatgacactcaattcagaagctactgtctttgaagaaatgtctaagccttttgaacatataaagaaaattgaaaatttaattaaggatgaaaccgattggcttgcacgaaatggacaagattatgaatccgatgaatatcaatcacatattgaaaaatatgaaactttaacgaatcgttatgagcaattagatggttatcaatatgagagtaaaattaaaacagtcctgcacgggcttaactttacagaaagcgatttcaacaagcctattaatgattttagtggtggtcaaaaaacacgtctttctcttgctcaaatgttacttaaagaacccgatttactccttcttgatgaaccaactaaccatctagacatggaaacaaccaagtggttagaggattacttaaagtactttaaaggggcaattgtaattatcagtcatgatagatattttttagataaaattgtaactcaagtttatgatgttgctctaggaaatgtaaaacactatgtaggaaactatgagcaatttataaagcaacgtaatcagtattacgaaaaacgcatgcaagaatttgaaaagcaacaagaagaaatcaagcgtttagaaacctttgtagaaaaaaatattactcgtgcatctacaagcggcatggctaagagtagacgtaaaacattggaaaaaatggaacgtattgataaacctatgatagatgctagaagtgcaaatatacaatttggcttcgaccgtaatactggtaatgatgtgatgcacattcatgatttaaaaattggttacgactcacctattacactacctataaacctcgaaatctttaaaggggatcatatagctatcattggtccaaatggtgttggtaaaacaacattgataaaaacaattgctgaaaaacaacataaactaggtggtcaaattatctttggtgttaatttacaaattggttactatgatcaaaaacaagctgaatttaaatcaaataaaaccattctcgattatgtttgggatcaatatccacatatgaatgaaaaagatgtacgggcagtattagggcgtttcttgttcgttcaagaagacgtaaaaaaaattatcaatgacttatccggcggcgaaaaggcacgattacaattagcacttttaatgttacaacgtgataatgttcttatcttagatgaaccgactaaccatttagatattgattctaaagaaatgcttgaacaagcattgaaagattttgaaggcacaattatttttgtatcacatgatcgttattttattaaccaacttgcaaataaagtttttgatttaaacattaatggtggccaaatgtatttgggagattatcagtattatattgagaaaactgaagaagctgcagctatcaaagcacatgaaacaataactcaaaataattttgaaaataaagagataaatcaagacgcaaatacttcaacctatatcagtcaaaagcaacaaaaaagacaacaacgtaaattagaaagacaaattgaacattgtgaaagacaaatcgaagaattagaagcacaaatatcacatatcgacgaacagttaacacaacctgaagtatttaacgaccctctaaaagctagtaaatttgccaatcaaaaatccgataccgaacaaaaattagaacaaataatgttggaatgggaaaaattacaagaaaagctctaa

SEQ ID NO: 9179 - DNA, 1617 bp, Staphylococcus epidermidis
atgacgaacaatcaaaccttagtactgattatattaactttcatcatcctaattacacttgtaaatgtaattatctctattatagagaggcgtaaacagattgctaaaataaatactttatgggataacaaattaaaattagaaagttttatacgtcctaattcacgattcgatgcccaatatcacgcttaccgcgatcattacaatgagcagtcatttatcgacgataagacttggtcagacctaaatatggatacgttatttcataaaattaattttaatttcactgcaattggtgaaatgcgactatatgcaactttaagaggtatgtttaaggtaaatcaaacctcattgataaacatgtttaaagaaaataaagtatttcgtttaaatgtatcttacattctttctaaaattggtaaaaatgtataccctttgtttccagatcaaatgttacccactaagcgaaatattttattaatgttttgtccgttgttaccatttatcgggttcgcattcatttttttaattccttcaaaaggtatattaatatgtcttacttttatgattttaaatgcaatattatctttcaaactaaaaaaatcttatgaccaagatttaaaatcaattttttatactgctaatgttataaagcaaagtcaagctttaagtaagattgagagcacgcccgcgataagtgttgattttactcattttaaagcttcacgccgttttagtggtttattagctagagtagaatcacaagatatggcgagtagcataatcatgtttattaaattagtattcatgatagattatgttttatttcatttaatacaacgcagctactttaagtatcaagaagaagttatgacatgttatgactacataagcatattagataatcattactctatagctatgtatcaacatactttgacacattattgttatcctaaaatcaatcacaatattaatggtcttcaaatgaaatcaatcattcatcctctactagatgaagaaaatgcgattgctaacacaattgacatttcaaatcatatattgctcacaggctctaatgcatcaggaaaatctacatttatgaaagcagttgcactaaatttgattttagctcaatcgatacaaactgcaacagctcactcatttatttatcaacctggctatgtaatgacatcaatggcaaatgcggatgacgttttaagtggtgacagttatttcatgtcagaacttaagtctattcgtagattatttaacactcatcagtgcaataagatatattgttttatagatgaaatttttaaaggaacgaatacaactgaacgtattgcggcttctgaatcagtattatcgtatttagataatcaaaaagcatatcaggttatcgctgcgacacatgatgttgaattatcaacattattagaaaatacatataataattatcattttaatgaatcaattcaagaaaatagcatatttttcgattacaaaattaaaccaggtaaagccaatacacgtaatgcaattgaattactacgcattacgcagtttcctatcgatatttatcagcgtgctcaacaaaatattcgaaacctctag

SEQ ID NO: 9180 - DNA, 1038 bp, Staphylococcus epidermidis
gtgggtgaatttgaaatgacaaataataaattaatcttagcaattgaaacaagttgtgatgaaacgagtgtaagtgtaataaagaatggcactgaacttttatctaatactgttttaagtcaaatagatagtcacaaacgttttggtggtgttgtacctgaagttgctagtagacatcatgttgaaggaataacagcaactatagatgaatcgttagtgagtgcaaaagtgaaaatggaagacattgacgctattgcagtaacacaaggcccaggattaataggagctttattgattggtattaatgcggctaaagctttggcatttgcttatgataagcctattattccagtacatcatattgctggtcatatttatgccaatcacttagaacaaccattaacgtttccactaatgtcattgattgtatctggtggtcatactgaactagtatatatgaaaaatcatttagatttcgaagtgattggtgaaacgagagatgatgcagtaggagaagcttatgataaagttgctcgaacaatcaatcttccttatcctggtggaccgcatattgatcgattagcagctaaaggtaaagatgtatatgattttccaagagtttggctcgaaaaagatagttatgattttagttttagtggtcttaaaagtgctgtaataaataaactgcataatttaagacagaaaaatattgaaattgtagctgaagatgttgcaacgagtttccaaaatagtgttgtagaagttttaacctataaagctattcatgcttgtaaaacttataatgttaatcgcttaattgttgcaggtggtgttgctagtaataaaggattaagaaatgcactaagtgaagcatgtaaaaaagagggtatacaccttactattccaagtcctgttctttgcactgataatgcagcgatgattggtgctgctggatattatttatatcaagctggtttgcgtggcgatttagctttaaatggacaaaataatattgatattgaaactttttctgtttaa

SEQ ID NO: 9181 - DNA, 438 bp, Staphylococcus epidermidis
ttgaatattaggaaaatgagtgtggaagatgttcctaaagtttttgatatagaaagaaatagtttctcacacagttcgtggtcaatcgatgcattttatcatgaaatagaaaacaacgaatttgctacatattttgttatagaatttagtgacaaaataattggatatgttggtttatggttagtcgttgatcaagcacaaattacaacgatagctatatcaaaggcatttagaggctatggtcttgggcaacttttacttaaatatgcaatgaactatgcacgtttttcttgtgatgtgatgagtttagaagtaagaatagataatgatgttgcacaacatgtttataggaatttgggattccaaaatggtggaaaaagaaagaattattatggagaaggcgaggacgcattagtcatgtgggtgaatttgaaatga

SEQ ID NO: 9182 - DNA, 663 bp, Staphylococcus epidermidis
atgaactatcttctaattgatacgtcaaaccaacctttatcagtagctattatgaaagataatgaagtgattgctgaaaaaacaactgatatcaaaaagaatcattcagtgcaactcatgcccgaaatagcagaaattcttacagaaagtaaaataaataaaacagaaataactgatatcgtggtagcggaaggtccaggttcatataccggtcttagaataggggttactgttgctaaaacattagcgtatgcattaaacactaacttatatggtgtctcatcacttaaagcacttgctagcacagtaaaagacagtacgaagttgttagtacccatttttgatgctagaagagaagcagtttatgcaggtgtttatcaatatcaggacaatgaattaataaccattattgatgacacttatatacctatttttgaacttattgaaaaacttcatcaattaaaccaaccttatgtgtttgtaggatttcatatcgaaaaaataaaacatttattagacagtgacatcgtagaacagttaccacaagcttcaagtatgaagcaattaatccaaaaaccagaaaatatacattcatttactcctaaatatcataaattatcagaggcggaacgaaattggttaaaccaacaagagaacaattga

SEQ ID NO: 9183 - DNA, 462 bp, Staphylococcus epidermidis; identical to SEQ ID NO: 4347

SEQ ID NO: 9184 - DNA, 432 bp, Staphylococcus epidermidis
atgttcaaaaatatattattaccctatgatttcgaaaatgattttagtgctatccctgactatttagaaaaagtcatcgatgaagattcagttgttgtaatttatcacgttgtaacagaaaatgatcttgcaattagtgtcaaatattataataagcataaagaagatattattagagaaaaagaaaaaaaactcactccatttttacgtgaattagaaaaaagagatattcaatataaaatagatgtagattttgggcatattaaagatacaatcttagaaaaaattacttctggagatataaataatggtgaatttgatttagtaattatgagtaatcatagagtcgatttgaatattaaacatgttttaggagatgttacacataagattgctaaaagaagttctgtcccagtactaattgttaaataa

SEQ ID NO: 9185 - DNA, 477 bp, Staphylococcus epidermidis; identical to SEQ ID NO: 2806

SEQ ID NO: 9186 - DNA, 624 bp, Staphylococcus epidermidis; identical to SEQ ID NO: 6769

SEQ ID NO: 9187 - DNA, 1269 bp, Staphylococcus epidermidis; identical to SEQ ID NO: 2808

SEQ ID NO: 9188 - DNA, 924 bp, Staphylococcus epidermidis; identical to SEQ ID NO: 2809

SEQ ID NO: 9189 - DNA, 636 bp, Staphylococcus epidermidis; identical to SEQ ID NO: 2810

SEQ ID NO: 9190 - DNA, 309 bp, Staphylococcus epidermidis; identical to SEQ ID NO: 2811

SEQ ID NO: 9191 - DNA, 429 bp, Staphylococcus epidermidis; identical to SEQ ID NO: 6774

SEQ ID NO: 9192 - DNA, 261 bp, Staphylococcus epidermidis; identical to SEQ ID NO: 2813

SEQ ID NO: 9193 - DNA, 2631 bp, Staphylococcus epidermidis
atgaaaaaaatgaaagctagtgaaattaggcaaaaatatttggatttctttgtagaaaaaggacatatgattgaaccgtctgcaccacttgtacctatcgatgatgattcattattgtggatcaattctggtgtagctaccttgaaaaaatactttgacggacgcgaaactcctaaaaaaccaagaattgtcaattctcaaaaagctatacgaacaaacgatatagaaaacgtcggttttactgctcgccatcatactttttttgagatgctaggtaatttttcaatcggtgactactttaaacatgaagcgattgaatttgcttgggaatttctaacaagtgataaatggatgggcatggaacctgagaagctatatgtgactattcatcctgaagatactgaagcttttagaatttggcatgaagacattggtttagaggaaagtcgcatcattcgaatagaaggcaatttttgggatatcggggaaggaccatctggaccaaatacagaaattttctatgatcgtggatcggcttatggaaaagatgatcctgctgaagaaatgtatcctggtggtgaaaatgaaagatatttagaagtttggaatctagtgtttagtgagtttaatcacaataaagacaatacttacacaccactaccaaataaaaatattgatactggcatgggattagaacgtatgacgtctatctcacaaaatgtaagaacaaattatgaaacagacttatttatgcctataattaaggaagtagaacatgtttcaggaaaaaaatatttaattgatgatgcacaagatgttgcatttaaagttatcgcagaccacattagaacgatttctttcgcaattgctgatggcgcattaccagctaatgagggtagaggatatgtattaagaagattattacgcagagcagttcgctttagccaatcattaggaattaatgaaccatttatgtataaacttgttgatatagtcgctgatatcatggaaccatattatccaaatgtcaaagacaaatccaactttattaaacgtgtcattaaatcagaggaagaacgcttccatgaaacgcttgaggaaggtcttacgattttaaatgaactgataaaagaagcgaagaatagtgatcaggttattaaaggtcatgatgcttttaagttatatgatacttatggattcccaatagaattaactgaagaattagcaactcaagaaaatttgtctgttgatatgcctacttttgaacaggaaatgcaacaacagagagatcgagctagacaagctcgacagaattctcaatcaatgcaagttcaaagtgaagtactaaaaaatattcaagatgaaagtcaatttgttggctatgaaactacggactatcaatcattaataactcatatcatatacaatggtgaagaagttaaacatgttgaagcaggagaaacaatttactttattttaagagaaacgcctttctatgcagtaagtggtggacaggtcgcagataagggaacagttggtaatgagagctttgaaataaatgtaactgacgtaactaaagcgcctaatggccaaaacttacacaaaggtattgtgcaatttggtgaagcaacacagaacgcgaaagtagaagcacgtgttaacaaagaggatagacgacttattcaaaaaaatcatagtgctacacatttattacatgctgcattaaaagaagtattaggagatcatgttaatcaggctggttcgttagtagaacctgaaagactacgttttgatttctcacattttggtcctatgacacaagaagaaattaatttagtagaacgtagagtaaatgaagaaatttggagagctatcgacgtctgtattcaagaaatgagtattgaagaagccaaatcaataggcgctatggctttatttggtgaaaaatatggagatattgttcgcgttgtcaatatggcaccattttcaatagaattgtgcggtggaatacatgtgaataatactgcggaaattggtctctttaagattgtgaatgaatctggaacaggtgccggtgttagaagaattgaagctttaacaggtaaaggtgcattcttacatcttgaagaaattgaaacacagtttaataatattaaaaatcatttaaaagttaaatccgataaccaagtagttgaaaaagttaaacaacttcaagaagaagaaaaaggactgcttaaacaattagaacaacgcaacaaagaaataacatcactaaagatggggaacattgaagaacaggttgagttgattaataatttgaaagttttagcaacagaagtagaaattccaaatccaaaagcgatacgttcaactatggatgactttaaatctaaacttcaagatactattatagtgttagtcggacaagttgatggaaaggtttctgtaattgctacagtaccaaaatcacttacaaatcaagtaaaagctggagatcttatcaaaaacatgacaccaattattggtggaaaaggtggaggtcgtcctgatatggctcaaggtggcggaactcaacctgaaaaaataacagaagcattacgctttattaaagattacattaaaaatctataa

SEQ ID NO: 9194 - DNA, 2433 bp, Staphylococcus epidermidis
atgtctgaccctacactttttgattattcaatgatcaaaggtacagttgatgctattttatttcaaaatacggataatttttatactgttctaaaagtagatactatagaatcaaatgaaaaatttgatagtatgccaactgtggtagggtttcttcccaatgtagttgaaggcgatgtttatacttttaaagggcaagtcgtacaacatccacgttatggtaagcaattaaaggctgaaacatttgaaaaagaattacctcaaactaaagaagccattattagttacttatcaagtgatttatttaaaggcatcggtaaaaaaacggctcaaaacattgtaaatacactaggtgaaaatgctataaatgatattttaactcgtccagaaatcttagaaagtgtacctagtttaccaaagaagaaacaaaagcaaattgctgatcagattaatgcaaaccaagaatctgagaaaattatgatacgtttacacgacctagggtttggtccgaaattatcaatggctatatatcagttctatatgggtgatactttaaatgtcttagataaaaatccttaccaattagtatatgacattaaaggtattggttttaataaggctgaccaacttgctcgaaatgtcggtattgagccacattcacctgaaagattaaaagcagcattattatttacgttagaagaagaatgtatcaaacaaggacatacatatctacctcgtacaattgttatagaaacaacacaaaatttactcaatgaagatattgagaaaccaattgaaacagagcaattactagaaatcattgacgttttatcagaagagaaaaaattaatatctgaagctgatcaggtatcaattccaagtttatactattcagaattgaaaagtgtgcaaaacttataccgaattaaaacaaacacatctaaattaaaagaaatagaacagtctgatttacaaatacatattggtgatattgagtcacaaaatgaggttaattactctgcctctcaaaaagaagcgcttgaaacagcaataaattctaaaattatgcttttaactggtggtccgggtaccggtaaaaccacagtcattaaaggtatagttgaattatatgcagaaatacatgggctctcgctcgattatgatgattacaatgaagatgattatccagtagtgttagctgcacccactggtcgtgcttctaagcgccttcacgaatcgacaggtttagaagcaatgacaattcatcgtttaatcggttggaaccaagatacacaaccacaggatattttagaaaatgagatcaatgcaagactcattatcatcgatgaaatgtcaatggtagatacttggttgttccatcaatttttaagcgctgtgcctttagaagcacaaattgtatttgtcggagatgaagatcagttaccatcagtaggtccaggacaggtatttaaagaccttattgattctgaaataataccgcgtgttaatcttaccgaagtatatcgtcagcaagatggttccagtattattgacttagctcaccgtatgaaattaaatgaacctatcgatattactaaacgttatcatgatcgtagttttattcgttgtggtacgaatcaaattccagacgttgttgataaagtagttaaaagcgctgtagctaaaggctatgatatgagtgatatacaagttttggctcctatgtataaaggtaacgctggtattaagagacttaaccaagttctacaatctattcttaatccgaagcaacaagatgatcgtgaaatagaatttggtgaagctgtgtttagaaaaggggataaagtacttcagttagttaatcgacctaatgataatatatttaatggggatataggtataatagtaggtatattttgggccaaagaaaatgctctaaataaggatgtgttagttgtagattttgaaggtaatgaaattacatttactaaacaagatttaatggaactaacacatgcatattgtacatctatccataaatcacaaggttcagaatttcctattgtaattatgcctattgttagacaatattataggatgttacaacgtcccattctttatacaggattaactagagctaaacaatcacttgttttgcttggtgaacaagaagcatttgatataggtttaaaaacaaatggacaaatacgattaacgcaattaaatgatttgttaaaatcgtattttggacaaaacaaagataatttaactacaaataaacaaacgattaacgaacaaaaagaaaataacaatcatctggatttgaaaaatgaaaaagaaaatgatatccaattaaacgagtcgacaattttccaaatcgatccaatgattaatatgggggaaatgacgccatatgacttcgttgaacgttga

SEQ ID NO: 9195 - DNA, 669 bp, Staphylococcus epidermidis; identical to SEQ ID NO: 2816

SEQ ID NO: 9196 - DNA, 1119 bp, Staphylococcus epidermidis; identical to SEQ ID NO: 2817

SEQ ID NO: 9197 - DNA, 1143 bp, Staphylococcus epidermidis; identical to SEQ ID NO: 2818

SEQ ID NO: 9198 - DNA, 996 bp, Staphylococcus epidermidis
atgaaaaatataaaattatctgcgttaaacttagtacctatacgtgaaggtcaagaagataaagatgcaattaacgatatggttacactcgctcaagcattagatgatttagattatgagcgctactggattgcagagcatcataatgctccaaatttagttagttcagctacttctctattaattcaacatacattagaacatactcattctatcaaagtaggttctggaggcataatgttaccgaatcatgcaccactagtcgtagcagaacaatttgggacattggaaacattattccctcaacgtgtagacttaggattaggacgtgctcctggtacagatatgatgacagcgagcgcattaagaagagatcagcataatggtgtttatcaattccctgaagaagttgaacaactgcaacaatattttggaccgagtcatcaacaagcatatgtacgtgcttatcctgcggtagataaaaatgtcccaatgtatattctaggttcatctacagattctgcacatttagctgcacgtaaagggttaccatatgtttttgcaggacattttgctccacaacaaatgaaggaagcactacaaatttatagagaattatttgaaccttcagaagtacttgataaaccttatgtaattgtttgtttaaatacaattgtgtcagattctgatgaacaaacagaatatttagcaactacgatgtctcaaataatggtaagtataacacgaggaaaaatgcaacctgtccaaccaccaacagatgatttaaaggccctattaacaccacgcgaatatgaattagcacaacaacgtttaaaagggtcacttataggatctgaagatacagttaaacaaaaacttgaatcgttcataaaagagtacggggatatcgatgaacttatggcaattagttatatctatgatcaagacaaacaaatagaatcatatcgaagattagaacgtgcaattaaatcatag

SEQ ID NO: 9199 - DNA, 144 bp, Staphylococcus epidermidis; identical to SEQ ID NO: 2820

SEQ ID NO: 9200 - DNA, 423 bp, Staphylococcus epidermidis
atgaaaatatcaacaaaagggagatacggattaacattgatgatatctcttgctaaaagagagggtcaaggttgtgtatcactaaaaacaattgctgaagaaaataaactaagtgatttatatcttgaacaattagtaggccctttaagaaatgctggattaattcgaagcgttcgaggtgctaaaggtggttatcaacttagagttccatcagaacaaattactgcaggagatattatccgattactagaaggaccgattacgtttgtagaaagtattgattcagaaccgcctgcacaaaagcaactatggattagaatgagagatgctgtaagagatgttttagatcatactacattaaaatatcttgcagattacaaagatacgaatgaagacttagagggttatatgttctatatttaa

SEQ ID NO: 9201 - DNA, 1272 bp, Staphylococcus epidermidis
gtgagtacagaaccattagcctctcgaatgagaccgaaaaatatagatgaaattatatctcaacaacacctggttggtccgaaaggtataataagaaggatggtagatactaaacgtctttcttctatgattttttatggtccacctggaattggtaaaacaagtattgcaaaagcaatttcaggcagtacacaatttaaattcagacaattaaatgccgtaacaaatacaaagaaagatatgcagctaattgtcgaagaagctaagatgtcaggacaagttatcttactattagatgaaattcatcgtttagacaaagctaaacaagattttttattaccacatcttgaaaatggcaaaattgtattaataggtgcaacaacttcaaatccttatcatgcgataaatccagcgatacgatctagagcacaaatatttgagctttacccattagatcaagatgatataagattggcattagatagagctataaatgataaggaaagaggtttaagtacttatcatcctattgtagatgaagatgctatcgaatatttttcaacgcaaagccaaggcgacgttaggagtgcattaaacgctttggaattagctgtactaagtgctcatattggtgaagaaaacgaaagacatattacattagatgacgcaaaagattgcttacaaaaaggtgcttttgtaagtgataaagatggagacatgcattatgacgtcatgagcgcttttcaaaaatcaattagaggtagtgatgtcaatgcagcactccactacttagcacgtctaattgaagctggtgacttacctacaatcgtacgtcgattacttgtaattagttatgaagatgttgggttagcatcacctaatgctggtcagaggactttagcagcaatacaatcagctgaacgtctaggttttccagaagcacgaattccccttagtcaagctgtaatagaattatgcttatcacctaaatcaaattctggtatcacagcaatagataaagctcttggcgatataagaaatggacatataggtcaaataccggattatctgaaagacggtcattattcaggtgctaaaaagttaggacgggctataggttacaaatatcctcataactatgaaaatggtcatgttatacaacagtacttaccagaaaaattaaaaaacagagtgtattatgaaccaaaaaccacatcaaaaagtgaacaacaatttaaaacaatttacgataacttacgaaataaaacataa

SEQ ID NO: 9202 - DNA, 777 bp, Staphylococcus epidermidis
atgaaacatcaattttcaaggaatgaattagcaataggacaagaagggctgaacttactaaaaaataagactgttgcagttttaggtgttggtggcgtcgggtcatttgcagctgaggcattggctcggactaatatagggcacatcatacttatagataaagatgatgtcgatattacaaatgtgaacaggcaaattcatgcactgacttcaactattggtcaaagtaaagtcacgctaatggaagaaagaatcaaattaataaatcccgattgtaaagtaacttctttgcatatgttttataccgaggaaacatacaaagatatcttcaataattatgatattgattattttattgatgcaagcgatacaatcatttataaagttcatctcatgaaagagtgtttagaaagaggaatggagttaatttcaagtatgggtgcagcaaataagactgacccgacacgttttgaaattgcagatatttcaaaaacacatactgatcctatggctaaagtaattagaaatcgtttaaaacgccttggtattcgtaaaggtgttaaagtagtattttctgatgaaagtcctattgttattcgcgaggatgtaaaagaaacagtaggagataaaaatgcaatcaatagaaaagggcaaatgcctccatcttctaatgcatttgttccaagtgtagtaggccttatttgtgcaagctacgttgtcaacgatattttaaaagatatacctgtaaggcgaattaaagataaaggacaaaattaa

SEQ ID NO: 9203 - DNA, 1767 bp, Staphylococcus epidermidis; identical to SEQ ID NO: 2824

SEQ ID NO: 9204 - DNA, 1275 bp, Staphylococcus epidermidis; identical to SEQ ID NO: 2825

SEQ ID NO: 9205 - DNA, 876 bp, Staphylococcus epidermidis; identical to SEQ ID NO: 2826

SEQ ID NO: 9206 - DNA, 453 bp, Staphylococcus epidermidis; identical to SEQ ID NO: 2827

SEQ ID NO: 9207 - DNA, 2190 bp, Staphylococcus epidermidis
gtgaataacgagtatccatatagcgcggatgaggtgctttataaagctaaatcatatttatcaacaagtgaatatgaatatgttctcaaaagttatcatatagcttatgaggcacataagggtcaatttagaaaaaatggcttaccttatattatgcatcctattcaagttgcagggattttaacagagatgcgtttagacggacccactattgtcgctggatttctacatgatgtgattgaagatacttcttatacatttgaagatgttaaagatatgtttaatgaagaaattgcacgaatagtagacggggtaactaaacttaaaaaggttaagtatcgctctaaggaagaacaacaagcagaaaatcatcgtaaactatttattgctattgctaaagatgtacgcgtaattttagtgaagttagcagatcggcttcataatatgagaactttaaaggcaatgccaagagagaagcaggtaagaatctctaaggaaaccttagaaatctatgctcctttagcacatcgtctcggaatcaacacgataaagtgggaacttgaagatacagcgctgagatatattgacagtgtgcaatatttccgcatcgttaatcttatgaagaaaaaacgtagtgaacgcgaagcttacattacaaatgcaatcaataaaattaaaaacgaaatgactaaaatgaatctttcgggcgaaattaacggtagaccaaaacatatttacagtatataccgcaaaatgataaaacaaaaaaagcaattcgatcaaatatttgatttgcttgctatacgtattatagttaattcgataaatgattgttatgcgacacttggtttagttcatacattatggaaaccgatgcctggacgttttaaagattatatagctatgcctaagcaaaatatgtatcaatcactacataccactgtagttggacccaatggcgatcctttagaaatacaaattagaacgcacgaaatgcatgaaatcgctgaacatggtgttgctgcacattgggcttataaagaaggtaagacagttaatcaaaaaacacaggattttcaaaataagcttaattggttaaaagaacttgctgaaaccgaccatacttctgcagatgcgcaagaatttatggaatccttaaaatatgatttacagagcgataaggtatatgcatttactccagctagtgatgttatagagttaccttatggtgcagtaccaattgattttgcttatgcaatacacagtgaagtaggaaataaaatgattggtgctaaggttaatggtaaaatcgtacctatagattatgttctacaaactggtgatattatagagattcgtacaagtaaacattcttacggtccaagtagagactggttgaaaattgtaaaatcttctagtgccaaaagtaaaatcaaaagtttctttaaaaaacaagatcgttcttctaatattgaaaaaggtaaatttatggtagaagcggagattaaagaacaaggattccgtgttgaagatattctaactgagaaaaatttagaagtcgttaatgaaaaatatcattttgctaatgatgaagatttgtacgcagctgttggattcggtggtgttacatcaatacaaatcgtcaataaattaactgaacgacaaagaatattagataaacaaaaggcattaaatgaggcgcaggaagttacaaaatctgtacctataaaaaaagatattaccacagacagtggtgtatatgttgagggattagaaaacgtcttaatcaagttatcaaaatgttgtaatcctataccaggtgatgatattgttggttatatcactaaaggacacgggattaaagttcatcgtacagattgtccaaatataaaaaatgagacagatcgattgatttcggtagagtgggtaaaatctaaagattcaacacaacaatatcaagttgatttagaagttactgcatatgatagaaatggcttgcttaatgaagtattacaagctgtaaattctactgctggaagcttgattaaagtatctgggcgttcagacattgataaaaatgcagtaattaatattagtgtgatggtaaaaaatgtcaatgatgtgtaccgtgtcgttgaaaaaattaaacaactaggtgacgtttatacagtatctagagtttggaactag

SEQ ID NO: 9208 - DNA, 519 bp, Staphylococcus epidermidis
atggatttaaaacaatatgtttcagaagtaaaagattggccttcagcaggtgtaagctttaaggatataacaactataatggataatggtgaagcttatggatatgctacggatcaaattgttgaatacgcaaaggaaaaaaatatagatatagtagttggtcctgaagccagaggattcataatagggtgtccagttgcttactcaatgggtattggatttgctccagtacgtaaagaaggaaaactacctcgagaagttattcgttatgaatataatttagaatatggaactaacgtattaactatgcataaagacgcgattaaaccaggacaacgagttttaatcactgatgatttactagctacaggtggaactattgaagctgcaataaagcttgttgaacaattaggtggtatagttgtaggtattgcttttattattgaacttaaatatttgaatggaattgataaaataaaagattatgatgtgatgagtttgatttcatatgatgaataa

SEQ ID NO: 9209 - DNA, 2274 bp, Staphylococcus epidermidis
atgattaaatcaaaatataattgggatataactcaaccgaatacctttataagtgagagtagcagtgatcaatttaaactttcacctatagtaaaaaaggtattagagagtaaaaatattgtggataatcaggagattcaaaatctatttgaaggcactaacattagtcatgattatatgttattaagtgatatgcaaaaagccattgatcgtattaaattagctatcgatcaaaatgaacgaatactagtatatggtgactatgatgcagatggtgttacatctactacaattctagtgtctactttacgtctacttggcgctcaggtggggtggtatattcccaatagatttacagaaggatatggacctaatgaattagcatttaaaaatgcttatgacgaagggatttccttaataataactgtagataatggtatacagggacatcgtgaaataagtaccatacaagaattaggtgtagatgttatagtgacagatcatcatgaaataggagaaactttacctgatgcttttgcaattgtacatccgatgcatcctaattttgaatatccttttaaatatttatgtggtgcgggtgttgcttataaattggcccaaggattgatagagcatccacctcaacatttcatagcattagctgccataggtacaattgcagatttagtatcattgacagatgagaatagatatattgtaaagcaaggagtaaagatattaaacaatcatacaccatcgtccataaaggctatcttaaatcaagcgggttttaatgatgaaataacagaagaaacaattggttttattattggacctcgattaaatgcggttggtagactagaagatgcatcattagctgctgaacttttattgtccgatgaatttgaagaggcggaatttttagctgaacaagttgaacattttaatcatgaacgtaaagatatagtatctaaaattactaatgaagcattgttattagcagaggaacaaatcaagcaaggccatttgtttcttttacttgccaaagaggggtggcatgagggtgtattaggtattgttgcatctaaaattgtagaaacatatgcactacctacattaattttaaatattgatgaaaatcaaaatcatgccaagggttctgcgaggtcgattgaacaagtttccatgtttgatattttaaatgatcatcaacagttaattgataagtttggtggtcatcacatggctgcaggaatgacaatgtctatcgataatattgaacatttacataaagagctagatatgtggatgaaagaactaactgttaccacttcattagagccttcaataaaggtggatgcacaacttgaagaaaaagaaattaacattaaaaatattaaagatatatttcaattaaggccttttggtacggactttaatagtcctctttttatggttagagatctaattgtcaagtcaacaaagggaattggacaggataataagcatcttaagttaacgcttggtcattcaggtttaactgctttattttggaatcatggacatttggcaagtgaacttgaaccaggtcaaccgattcatataataggaacattgcaaattaatgaatggaatggtaatcaaacacctcaatttatcatcaaagacattgctatagaccaattacaaattttagattatcgtagtaaacgtaaaaatatacaatttaaagaaactgaatcaaatgttgcctatgtcattcatccgaaacttaaaaaaagcaattcacattactatcattatggtgaggttattgatagaccttatgataaaatagtgtttagagatttacctaatactatggttgaaattgaacaaaccttagaacattcacaaatttctcaactatatttagttctgcagcatgaaaagtcaatatattttgaaggtatccctagcaagtcgctttttaaaaagtgttacaaagctttaataaacaaaaaagaaactgacttaattaaagaaggtatgctgctttgtgagtacttaaatattaagccagaaatattaacattcatgcttaaagtctttaaagaattggagtttatttacgacgaaaagggattgattaagataaatccagcgccaaataaacaagatatagaaaatagtcgtatttaccaaatgagacgagcacgtatggaagtagaagaacgtcttctctatgatgattttttaaatataaaagaatggataatatcaaagttaacatag

SEQ ID NO: 9210 - DNA, 117 bp, Staphylococcus epidermidis; identical to SEQ ID NO: 2831

SEQ ID NO: 9211 - DNA, 2226 bp, Staphylococcus epidermidis; identical to SEQ ID NO: 2832

SEQ ID NO: 9212 - DNA, 261 bp, Staphylococcus epidermidis; identical to SEQ ID NO: 2833

SEQ ID NO: 9213 - DNA, 1140 bp, Staphylococcus epidermidis; identical to SEQ ID NO: 2834

SEQ ID NO: 9214 - DNA, 1026 bp, Staphylococcus epidermidis; identical to SEQ ID NO: 2835

SEQ ID NO: 9215 - DNA, 1005 bp, Staphylococcus epidermidis; identical to SEQ ID NO: 2836

SEQ ID NO: 9216 - DNA, 603 bp, Staphylococcus epidermidis; identical to SEQ ID NO: 2837

SEQ ID NO: 9217 - DNA, 456 bp, Staphylococcus epidermidis
ttggacaataaagacaatcgaaaattttatttaattagagaagatgtactaccagaatctgtcatcaaaactttaaaagttaaggatgctttaaaaaataattcgaatttgtccatttatgatgctgtaaaacaattcaatctctctagaagtgcattttacaaatatagagagacaatatttccagtagatgaaaaaatattagatcaaagagaatttactttgattttatatgtaaatgatattgttggaatgttagcccaagttcttaatgcaatctctcaacttcaattatcagtgttgacaattcatcaaagtgttccaattgaagataaagcgacaatcacactatctttaaatgcgagaaattctaatttatccattgatgaggtcattgaatcattaagagagataaatcatgtaactaaagtagacttaataagtatgactatgtaa

SEQ ID NO: 9218 - DNA, 1293 bp, Staphylococcus epidermidis; identical to SEQ ID NO: 2839

SEQ ID NO: 9219 - DNA, 285 bp, Staphylococcus epidermidis; identical to SEQ ID NO: 2840

SEQ ID NO: 9220 - DNA, 321 bp, Staphylococcus epidermidis; identical to SEQ ID NO: 2841

SEQ ID NO: 9221 - DNA, 309 bp, Staphylococcus epidermidis; identical to SEQ ID NO: 2842

SEQ ID NO: 9222 - DNA, 522 bp, Staphylococcus epidermidis; identical to SEQ ID NO: 2843

SEQ ID NO: 9223 - DNA, 840 bp, Staphylococcus epidermidis; identical to SEQ ID NO: 2844

SEQ ID NO: 9224 - DNA, 141 bp, Staphylococcus epidermidis; identical to SEQ ID NO: 2845

SEQ ID NO: 9225 - DNA, 486 bp, Staphylococcus epidermidis; identical to SEQ ID NO: 2846

SEQ ID NO: 9226 - DNA, 180 bp, Staphylococcus epidermidis; identical to SEQ ID NO: 2847

SEQ ID NO: 9227 - DNA, 681 bp, Staphylococcus epidermidis
ttgagaataaatgaaatggcactgcatgaaaaacctagagaacgtttaattacatatggcgctaaaagtctatccaatgttgaacttttagctattctcttaaacactggtagaaaaggattttctagtattgacattgcaaacgaattattgaagcaacaatccactattagagatttaaaaaaattgtctataaatgatctactgaaaataaagggcattggactttataaagctgtaatattacaggctgcatttgaactaggtgaacgtattaattctacaagcacttttgacaaagtacagattacacatcctagtgatgttgctagtctgatgatgtcgacaatgaaagatttagagcaagaacattttgttgtacttttacttaactcaaaaaatatagtcacaaaacaagcttgggtatataaaggcacattgaatagttcgattattcatccaagagaagtatttaatattgcaataagagagtcttctaattcaataatagttgtacataatcatccttcaggtgatgtaacaccttcgaaagaggatattactacaacgtatagacttaaagagtgcggagatatattaggtataaatttacttgatcatattattattggtgataataaatttacgagtttagttgaagcggggtattttgataaataa

SEQ ID NO: 9228 - DNA, 711 bp, Staphylococcus epidermidis; identical to SEQ ID NO: 2849

SEQ ID NO: 9229 - DNA, 1266 bp, Staphylococcus epidermidis
atgaattacctagacagcttgtattggatacacgaaagatctaaatttggtatcaaacctggcgtcaaacgtatggaatggatgctagaacaattaaataatccccaacataaaattagaggtattcatgtgggtggaacaaatggtaaaggttcaactgttgcatacttgagaaccgcattaattgagaacgattactcagttggaacatttacctcaccatttattgaaagtttcaatgaacgtattagtttaaacggtgtaccaattatgaacgatgaaattgttaaattagttgaacgagttaaacctgttagtgaagccttagagatagaaacagatttaggtggggctactgaatttgagattataacaacaatgatgttcctttattttggtgagataaatcctgttgattttgtgataattgaagcaggtttaggaattaaaaatgattcgacgaatgtttttaaacctgtgctatccatactcacaagtataggacttgaccatacagatatcttaggaacaacttatttagatattgcaaaagataaggcagctataatcaaaccacatataccgattgtttatgcggtaaaaaatgacgatgctttaaagtatgtgagagattatgcgctagaacagaacgcaaaaccaattgaattggatcgggagattaccgttgtctcccaagatgatgagttcacatatcggtataaagattatgaattagaaactatcattcttaatatgttaggggaacatcaaaaggaaaatgcagcacttgctattactgctctcattgaattaaatgaaagacaaatcatagaattagattttaataaaatgatagacggtatagaatctgtgaattggacaggtagaatagaacaagtaaaagaacaaccattaatggttattgatggtgctcataataatgaaagtattgatgcgttagtagacacaataagacattattatggaagagataaaattgatattttattttctgcaattaaaggaaagccaattcatagtatgattaacaaattaaatgatattgcatcaaaattctatatagcagattttgagtttccaaaagcattagctaaagaagaaattgccgaagaattgaaattagataatttacatttaattgatgattatgttgattttattgaaaattacgaaggtgatgggctgattattactggaagtttatacttcatcagcgaggtaaaagcaaaaattaattttaattaa

SEQ ID NO: 9230 - DNA, 2631 bp, Staphylococcus epidermidis; identical to SEQ ID NO: 2851

SEQ ID NO: 9231 - DNA, 561 bp, Staphylococcus epidermidis; identical to SEQ ID NO: 2852

SEQ ID NO: 9232 - DNA, 1068 bp, Staphylococcus epidermidis; identical to SEQ ID NO: 6815

SEQ ID NO: 9233 - DNA, 1287 bp, Staphylococcus epidermidis
atgatgagttttgaaaaatctattaaagcaatggagcaagctgagaaattaatgcctggcggtgttaacagtcccgtaagagcatttaaatcagtagacacaccagctatttttatggatcatggtgaaggatctaaaatatatgatattgatggaaatgaatacattgattatgtgctaagttggggcccattaattctgggacataaaaatcaacaagttatatccaaattacatgaagcagtagataaaggtacaagcttcggcgcttcaacacttcaagaaaataaacttgctgaacttgtgattgaccgtgtaccttcaattgaaaaagtaagaatggtttcctcaggaactgaagctactttagacacacttcgtttagctaggggttatacaggacgtaataaaattataaaatttgaagggtgttatcatggacacagtgattctttattgattaaagcaggatcaggtgttgcaacactaggtttacctgattcaccaggcgtccctgaaggtattgctaaaaacactatcacggtgccatataatgatttagattcacttaaattagcgttcgaaaaatatggcgatgatattgctggtgttattgttgaaccggttgctggaaatatgggtgtagtgcctccagtgaatggatttctacaaggtttaagagatattactaatgaatatggagcattacttatatttgatgaagtgatgactggtttccgtgtaggttataattgtgcgcaaggatactttggtgtaacacctgatttaacttgcttaggaaaagtgataggtggaggtttacccgttggagcttttggtggtaaaaaagaaattatggattacattgctcctgttgggactatttatcaagctggcacactttcaggtaatcctttagcaatgactagtggttatgaaacattgagtcaacttactcctgaatcttatgagtattttaattctctaggagatatacttgaaaaaggattaaaagaggtatttgctaagcataatgttccaatcacagtaaatcgcgctggttcaatgattggttacttcttaaatgaggggcctgtaacaaattttgaggaagcaaataaaagtgatttaaaattatttagtaatatgtatagagaaatggctaaggaaggtgttttcctaccaccttcacaatttgaaggaacatttttatcaactgcacatactaaagatgatattgagaaaactatccaagcatttgataatgcattaagtcgtattgtgtga

SEQ ID NO: 9234 - DNA, 975 bp, Staphylococcus epidermidis; identical to SEQ ID NO: 4580

SEQ ID NO: 9235 - DNA, 681 bp, Staphylococcus epidermidis; identical to SEQ ID NO: 4579

SEQ ID NO: 9236 - DNA, 927 bp, Staphylococcus epidermidis; identical to SEQ ID NO: 4578

SEQ ID NO: 9237 - DNA, 813 bp, Staphylococcus epidermidis; identical to SEQ ID NO: 4577

SEQ ID NO: 9238 - DNA, 1347 bp, Staphylococcus epidermidis
atgcattttgttgcaattagcataaatcatcgaacagctgatgtaacattaagagagcaagttgcttttagagatgatgccttacgattagcacatgaagatttatatgaaactaaagcaattttagaaaatgtcattttatctacatgtaatcgtactgaagtatacgctattgttgatcaagttcatacaggacgttattatatacaaagatttttagcgcgctcttttggatttgaggtagatgatatgaaagatatgtcgcaagttaaagtgggggacgatgcagttgaacatttattgcgtgtcacttctggcttagattcaattgtgcttggtgaaacacaaattttaggacaaatgcgcgatgcatttttcttagcgcaaaatactggtacaactggaacgatttttaatcatttatttaaacaagcgattacttttgctaaaaaagcacacagtgaaacagacattgcagataatgctgtgagtgtttcttatgctgctgttgaattagctaaaaaggtatttggaaaattaaaaagtaaacatgctgtcgttattggagcaggggaaatgggtgaattatcactcttaaatcttttaggttctggaatttcaaatgtaacaattgttaatcggacattatctaaagctaaaattttagccgaaaaacacaatgtttcatatgattcactttcagcattaccatctttattagaaacaacggacatagtaattagttctacaagtgctgaagactatatcatcactaattctatggtgaaaacaatttcagaaactagaaaactggattcattagttctgattgatattgcggttccacgagacattgaaccagggattgatgcaattacaaatatttttaattatgatgttgatgatttgaaagatttggtagatgccaatttaagagaacgtcaattagctgctgaaactattgcaggacaaatacctgaggagattgattcacacaacgaatgggttaatatgcttggtgttgtacctgtaatcagagctttacgtgaaaaagctatgaatatccaagcagaaactatggaaagtattgatcgtaaattgccagatctctctgaaagagaacgtaaagtcatttcgaaacatacaaaaagtattatcaatcaaatgttaaaagatcctatcaaacaggctaaggaattaagtactgataaaaaaagtaatgaaaaattagagctatttcaaaacatatttgatattgaagccgaagatcctcgtgaaaaagcaaagttagaaaaagagagtagagcaaaggaaatcttagcgcatcgaatatttagttttgaataa

SEQ ID NO: 9239 - DNA, 588 bp, Staphylococcus epidermidis; identical to SEQ ID NO: 4575

SEQ ID NO: 9240 - DNA, 1263 bp, Staphylococcus epidermidis; identical to SEQ ID NO: 4574

SEQ ID NO: 9241 - DNA, 1302 bp, Staphylococcus epidermidis; identical to SEQ ID NO: 6824

SEQ ID NO: 9242 - DNA, 924 bp, Staphylococcus epidermidis; identical to SEQ ID NO: 4572

SEQ ID NO: 9243 - DNA, 612 bp, Staphylococcus epidermidis; identical to SEQ ID NO: 4571

SEQ ID NO: 9244 - DNA, 357 bp, Staphylococcus epidermidis; identical to SEQ ID NO: 4570

SEQ ID NO: 9245 - DNA, 201 bp, Staphylococcus epidermidis; identical to SEQ ID NO: 4569

SEQ ID NO: 9246 - DNA, 528 bp, Staphylococcus epidermidis
gtgtcaaccatagcaaaagatcaaactcaaattaatgagaaaattcgtgcaaaagaactacgcttaataggccaagatggtgaacaaattggtgttaaatctaaacgtgaagctttagaaatggctgaacgtgtggatttagatttagttgttgtagcaccaaatgcaaaaccacctgttgcgagaataatggattatggtaaatataaattcgaacagcagaaaaaagaaaaagaaatgaagaagaaacaaaaagtcattaacgttaaagaattacgtttaagcccaactattgaagaacatgatttccaaactaagttgaaaaatggacgcaagttcttatctaaaggcgataaatgtaaagtttcaattcgtttcagaggtcgtgcgattacacataaagaaattggtcagcgtgtgttagaaaaatttgcagatgaatgtaaagatattgcaactgttgaacaaaaacctaaaatggaagggcgtcaaatgtttattatgttagcgcctatcaacgaaaaataa

SEQ ID NO: 9247 - DNA, 1503 bp, Staphylococcus epidermidis; identical to SEQ ID NO: 4567

SEQ ID NO: 9248 - DNA, 1938 bp, Staphylococcus epidermidis
atgaatcaaattaatattcaatttccagatgttaatacaaaagaatttgataaagggactactacagaagacatcgctcaatcaattagtccaggattaagaaaaaaagcagttgcgggaaaattcaatggtcaacttgtagatttaacacgccctttagaacaagatggagctattgaaattattactcctgggagtgaagaagcgttagaagtacttcgtcattcaacagctcatttaatggcacaagcattaaaacgtttatacggagacgttaaatttggagttggacctgtaatagaaggcggattctattatgattttgatatggatgataaggtttcatcggatgattttgataaaattgagaaaacaatgaaacaaattgtgaacgaaaatcataaaattgtaagagaagtagttagtaaagaaaaagcaaaagacttcttcaaggatgacccttataaattagaacttattgatgcaattcctgaagatgagagtgtaacactttatactcaaggtgaatttactgatttatgtcgaggtgtacacgtaccttctacttctaaaattaaagagttcaaactattatctacagctggtgcttattggcgtggaaatagtgataataaaatgttacaacgaatttatggtacagcattctttgacaaaaaagatttgaaagcacatctaaaaatgttggaagaacgtcgtgagcgtgatcatcgtaaaattggtaaagatttagaattgtttacaaacaatcaactcgttggtgctggtttaccattatggttaccaaatggtgctacaatacgtagggaaatagaacgttatattgtcgataaagaagtaagtatgggatacgatcatgtttacacaccagtattagccaatgttgatttatataaaacatctggtcactgggatcattatcaagaagatatgttcccagcaatgaagttagatgaagacgaagcaatggtcttaagaccaatgaactgtccacatcatatgatgatttataaaaacaaacctcattcttatcgcgaattacctatacgtattgctgaattgggtactatgcatcgttacgaagcaagtggtgcagtatcaggtttacaacgtgttcgaggaatgacattgaatgattcccatattttcgttagacctgatcaaattaaagaagaatttaaacgtgtagttaatatgattcaagatgtgtacaaagattttggttttgaagattatcgcttcagattgagttatagagatcctgaagataagcataagtactttgatgatgatgaaatgtgggaaaaagctgaatccatgcttaaagaagcatcagatgaattaggtttaacttatgaagaagctattggtgaggcagcattctatggacctaagttagatgttcaagtaaaaacagctatgggaaaagaagaaactctatcaacagcacaacttgattttcttttaccagaacgttttgacttaacgtacattggtcaagatggagaacaacatcgtcctgtagttatacaccgtggtgtagtttctactatggaacgttttgttgcatttttaacagaagaaacaaaaggtgcatttccaacttggttggcgcctatgcaagttgaaattattcctgtaaatatagatttacattatgattatgcaagacttttacaagatgaactaaaatcgcaaggtgtccgcgttgaaattgatgaccgtaatgaaaaaatgggatataaaattcgtgaagctcaaatgaaaaaaataccttatcagattgttgtaggtgaccaagaagtagagcatcaagaagtaaatgtaagaaaatatggttctgaaaaacaagaatcagttgaaaaagatgaatttatttggaatgttattgatgaaatccgtttgaaaaagcatagataa

SEQ ID NO: 9249 - DNA, 921 bp, Staphylococcus epidermidis; identical to SEQ ID NO: 6832

SEQ ID NO: 9250 - DNA, 1371 bp, Staphylococcus epidermidis; identical to SEQ ID NO: 4564

SEQ ID NO: 9251 - DNA, 471 bp, Staphylococcus epidermidis; identical to SEQ ID NO: 4563

SEQ ID NO: 9252 - DNA, 1026 bp, Staphylococcus epidermidis
atggcaacgaatattgcaattaacggtatgggtagaataggtagaatggtgttacgaatagcactaaataataaaaatttaaatgttaaagcgattaacgctagttatccacctgaaacaattgcacatttacttaattatgatacgacgcatggagtttatgataaaaaagttgaaccgattgaaagtggtattaaagtgaatggacatgaaattaaattactttctgatcgcaatccagaaaatttaccatggaatgagatggatattgatgttgttatagaagcgacaggtaaatttaatcacggagataaagcagttgctcatattaatgcaggtgctaaaaaggtattactcactggaccgtctaaaggtggagacgttcaaatgattgttaaaggagtcaatgataatcaacttgatattgatacatacgatatttttagtaatgcatcttgtactactaattgtatcggaccagttgcaaaagtcctcaatgataaatttggaatcataaatggtctgatgacaactgttcatgcaataacaaatgatcaaaaaaatattgataatccacacaaagatttaagaagagcacgttcttgtaatgaaagtattattccaacgtcaacaggtgctgctaaagcacttaaagaagtattgcctgaagttgaaggtaaacttcatggaatggctttaagagtaccaacaaaaaatgtctctctcgttgatttagttgttgatttagaacagaatgttacagttacacaagttaatgatgcatttaaaaatgccgatttatcaggtgttcttgatgttgaagaagctcctttagtttctgtagactttaacacaaatcctcattcagcaattattgattctcaatctacgatggttatgggacaaaataaggtgaaagttatcgcttggtatgataatgaatggggttattcgaatagagttgttgaagtagctgtcaaaattggacaattaattgatgataaagcaatggtaaaagccatttaa

SEQ ID NO: 9253 - DNA, 117 bp, Staphylococcus epidermidis; identical to SEQ ID NO: 4560

SEQ ID NO: 9254 - DNA, 612 bp, Staphylococcus epidermidis; identical to SEQ ID NO: 6837

SEQ ID NO: 9255 - DNA, 873 bp, Staphylococcus epidermidis; identical to SEQ ID NO: 4558

SEQ ID NO: 9256 - DNA, 2631 bp, Staphylococcus epidermidis
ttgaataaattagtattaatagatggtaatagtctaagctttagagcgttttatgctctccctttactttcaaaccatgcaggtattcatacaaatgcagtttacggctttgctatgctcttagaaaaaataattaaagaagaaaaaccgaatcattttttagttgcatttgatgcaggtaaaacgactttcagacattctaagtacagtgaatataaaggtggtcgtcaaaagactccacctgaattaagtgagcaatttccatatattcgtcaacttttagatgcgtatcatattaaaagatatgaacttgataattatgaagctgatgacattataggaacattaagtagacaagctgatgaagaagattttgaaaccattatcattacaggtgatagagacttaactcaattagccactgataatgttacaatatattatacaaaaaaaggtgttaccgacgttgatcattatacacctaaatttatagcagagaaatataatggtttagtgccgaaacaaattatcgatatgaaaggtctaatgggggatacctctgacaatattcctggcgttgctggtgtcggcgaaaagacggctattaaattacttaatcaatttgagtcagtagaaggggtctatgaacatattgaggaggtcactgcaaaaaaattaaaagaaaaactcatcaatagtaaagatgatgccttaatgagtaaagatttagcaacaatcaatgttcacagtccgattgaagtatcattagaagatacaaaattaactctacaagacgacactacaaaaaaaattgaactatttaaaaagctagaatttaaacaactattagcagatatagacacatcctctacgaatgaagaagtcatagataaaacttttgaaattgagcaagactttcaaaatgtagatttgaatgatttaaacgaagcggtaatacattttgaactcgaaggcactaattatcttaaagacactattctcaagtttggtttttatacaaatcatcaacatgtagtgataaatgctgaggatgtaaaggattataaacatttagttcaatggcttgaagataaaaatacaactaaaattgtctatgatgcaaaaaaaacttatgtatctgctcatcgattagggattaatatagaaaatattgaatttgatgttatgttagcaagctatattattgacccatcacgttctattgatgacgttaaatctgtggtaagtttatatggacaaaattatgtaaaagataatattacaatatttgggaaaggtaagaaacatcatatacctgaagaaccaattctaaacgaacacattgcctctgtgacagaagctatagcagctgtaactccaaccatgaaatcacagttagaagattataatcaaattgaactgttgaaagatttagaattaccattagcaagaattttaagtgaaatggaagaaattggtatatataccgatatcaatgatttgaaagaaatggaattcgaaattcaaaaaaaattggatgtattaatatccaatattcatgagtcggctggtgaagcgtttaatatcaattctcctaagcaattaggtgttgttttatttgaaacattacaattgcctgtcattaagaagaccaaaacgggctattcaacagctgtagacgtattagaaaaactacaaggtgagcatcctattatagatgatattttagaatatagacaacttgctaagttgcaatctacgtatgtagagggattacaaaaagtaataagcaaagatcatagaattcacacacgttttaatcaaacgcttgctcaaactggtagattatcaagtatagatcctaatttacaaaatatacctatacgattagaagaaggaagaaagattagaaaggcctttaaaccaacttctaaagatagtgtgattttatctgctgattattcacaaattgagttacgtgtacttgctcatattacgcaagatgaaagtttaaaacatgcatttataaacggacatgatattcacactgcaacagcaatgaaagtatttaatgttgaatctgaccaggttgatagtttaatgagacgtcaagcaaaagctgttaactttggtattgtatatggtatcagcgattatggattgagtcagagcttgggtattactagaaaacaagcaaaagcatttattgatgattatttagctagttttccaggtgtaaaacaatatatgtcagacattgttaaagatgcaaaagcacaaggttatgtggaaacactacttcatcgtcgtcgatacattcctgatataacaagtagaaactttaatttaagaagttttgcagaaagaacagcaatgaatacacccatacaaggtagtgcagctgacataataaaattagcaatggttaaattcagtgaaaagattaaagaaactaaatatcatgctaagttattattacaagttcatgatgaactcatatttgaaataccaaaatcagaagtagaagattttagtaaatttgtagaagaaattatggaacaagcattagtgctcgatgtacctttaaaagtagattcgaattatggtgcaacatggtacgatgctaaataa

SEQ ID NO: 9257 - DNA, 1698 bp, Staphylococcus epidermidis
atgttgaagttccatttgcgtttattactattaattagtactattacaatcattagttttattggtttaggcgctatcattcacaacacaatttatcaaacattaactagtaatcaaattaaaagcttagatagtgaagcccgtaattatgttaatctctttaataataataaagagaaagaaatcactaatatagctcataatgaaaaaaatatcatattaataaaagaaaaagataaagataaaattatttactcaagtggaaatattaaagatattgaccatagaattgataatgaagctaatccttcgaaattaatcaataaaaacacaaaactcggtatgcgttacacctataagaatacaatagatgataaaacaatatacataagtggaattaataatgaaattattgatttacaaaaggatttatggaaatacttgtctattgttggagtcattgtattatttacggtctatttagcaagtagaagtatcaatcgaacatatattagacctatcaatgaagtaacttatgctacatcacttctagcagatggatattaccatgttcgtgttccagaaagtaatgtgaaggaaactagggcattatttgtgactacaaatgacttagcacgacgattgcaaaaattaaacaatagtcaaaaaattcaatccaatagattaaaaactaccttagaaaatataccgagttcagtaatgatgattgataaacatggagaaattgtagttgctaatcatgcttattatcaggtgtttaaccctgatcaaatggtagaaaataaaagttacattggtttcatagatgatagtattgaaaaattaattattgaaagttttagaactgaaaaagttatctatgaacaattagaagttgctattaataacgtacatactaaatatttcgatgtatcttgtatccccattttaactaaatctaaaaaaaatttacaaggtatggtggttgtgcttcatgacattactaatttgcagaaattagaaaaccttagaagggaatttgttgcaaatgtgtcacatgaactaaaaacaccgattacttcaatcaaaggttttgcagaaactctgattgaaggtgctaaaaatgatgaacaatcgcttgatatgtttttaaatattattttaaaagaatctaatagaatagagtcattggttacagacttattagatttatcacatatagaacagcaaaaagaacttgaaataaattacatgaatttatctgaattagctattaatataatagataatttgcaaacacaagcatacaataagagaatcaaaatacaatctgaaattgaaaaagatgtcatcattgaggcacatgaaaataaaatagcgcaagttattactaatttgctatcaaatgctataaattattcttcagaagataataaggtaatagtaagagtatatagaaatgacaataaagtttatttagagattcaagattatggtattggtataagtgaaacagatcaaaagcgtatatttgaacgtttctatcgtgtagataaagcgagaagtagagattcaggtggtacaggacttggtctgtctataacaaaacatattgttgaagcacataatggtagaatagacgtgaaaagtgcacctggcaaaggttcgatattcaaagttctatttaatgataattaa

SEQ ID NO: 9258 - DNA, 711 bp, Staphylococcus epidermidis
atgtcacaaaaaatattagtggttgatgatgagcaatccatcgtgaccttactaaaatataatttagaaacagcagggtatatagtcgaagtcgcttatgatggtgaagaggcattgaaaaaagttgaaacagaacaaccggaactaattgtattagacgttatgttgccaaaaaaagatggtatagaagtatgtaaaacaatcaggtctgataaaaatttagtaccgattttaatgttgacagcaaaggacgatgaatttgatcgagttttagggcttgaactaggtgctgatgactatatgacaaaaccattttcacctagagaggtagttgccagagttaaagcaatattaagacgttctcaatttgtaaatgaaattgagaaggaagatgttgatgatgaagatattatcattggttcaattagaattcgacctgaattctttgaagtctataaagaagatgaattattagaattgacgccaaaagaatttgaattgttattatatttaattgaaagacaaggaagagttattactcgagaacatatgttgaattcagtgtggaattatgaattcgctggagattctcgaattgttgatgtacatataagccacttaagagataaattggaagaaaatcctaagcaacctaaattgataaagactgtacgtggtttaggttataaactggagagacctaaagcttaa

SEQ ID NO: 9259 - DNA, 1269 bp, Staphylococcus epidermidis
atgtctgcagaaaaaataacacagagtaaagatggtttaaatgtacctaatgaacctattattccgtttattattggtgatggtattggaccagatatttggaaagcagctagccgagtaatcgatgctgctgttgaaaaagcgtataatggagaaaaacgtatagaatggaaagaagtcttagcaggtcaaaaagcttatgatgaaactggagaatggttgccacaagaaacgttagaaacaatcaaagaatatttaattgctgttaaaggtcctttaacaactccaattggtggtggaattcgttcattaaacgtagcactgagacaagagttagatttattcacttgtttacgtccggtacgttggttcaaaggcgttccttcaccagttaagcgacctgaagatgttgatatggttattttccgtgaaaataccgaagatatatatgcagggatagaatttaaacaaggtacatcagaagtaaaaaaagttatagatttcttacaaaatgaaatgggagcaactaatattcgtttccctgaaacttctggtattggtataaagccagtatctaaagaaggtacagaacgtctagtaagagcagctattcaatatgcacttgataataatcgtaaatcagtaactttagttcataaaggtaatattatgaaatttactgaaggttcatttaagcagtggggctatgatttagctcataatgaatttggtgataaagtgtttacatggcaacaatatgatgaaattgttgaacaaaagggtaaagatgctgcgaatgaagcacaaagtaaagctgaacaagaaggtaaaattattattaaagactctattgctgatatcttcttacaacaaatattaactcgtccagctgaacatgatgttgtggcaactatgaatttaaatggtgactatatctctgatgctcttgcagctcaagttggaggcattggtattgcgcctggtgctaacattaactatgaaactggacatgctatttttgaagcaacacatggtactgcacctaaatatgctggtttaaataaggttaatccgtcatcagaaattttaagttcagttttaatgcttgaacatttaggttggcaagaagccgcagataaaatcactgactctattgaggcaacaattgcttcaaaaatcgtaacatatgattttgcgcgtcttatggatggtgcaaaagaagtttcaacatctgattttgctgatgaactaattaagaatattagataa

SEQ ID NO: 9260 - DNA, 1122 bp, Staphylococcus epidermidis
atggcagaattaaaaagaggtttagaaggggttattgcagctgaaactaaaattagctcgataattgacagtcagttaacatatgcgggctatgatattgacgatctcgcagaaaacgcgcaatttgaagaaataatttttttactatggaattatagacttcctaatgaaaatgagttaagtgaattaaaagaaaaattatttgattatatgactcttaataatagagtatacaagcactttgaggagtatgtgacggatcatgtacatccaatgactgctctacgtacatcagtatcatatgtagctcattttgatccagaagcggaaaatgaatctgatgagaataaatatgatagagctattcgtattcaagctaaaatcgcttctttagtaacggctttcgctagagttagagacggtaaagaacctgtcaaacctaattctgaacttagttatgcagcaaatttcttatatatgttaaggggagaactaccaacagaagttgaagttgaagcatttaataaggcattaattttacatgctgatcatgaacttaacgcatctgcatttacggcacgttgcgcagtatcttcattatcagatatgtattcaggtgttgttgcagctattggttcattaaaaggaccattacatggtggtgcaaatgaacgagtgatgtcaatgcttaaagaaataggaagcattgataatgtagatcactatttagatgaaagatttgcaaataaagataaaattatgggctttggtcatcgtgtttataaagatggtgatccaagagctaaatatttaagagaaatgagccgtaaaatcactgaagaaacagggcaaagtgaactgtttgaaatgtcattagccattgagaagagaatgaaagaagaaaaaggacttattcctaatgtcgatttctttagtgctacagtctatcatagtatgaatattccacatgacttattcacaccaatatttgcagtaagtcgtacttctggctggattgctcatattttagagcaatatcgagacaatagaattatgcgaccaagagctaaatatataggtgaacaaaatcgtaaatatgtgcctattgaagaaagaccataa

SEQ ID NO: 9261 - DNA, 1359 bp, Staphylococcus epidermidis
atggctgagaatttacaaagagaattgagcaatagacatgttcaattaattgccatcggaggtgctataggaactggtctgttcctaggtgccggacaaactatcgcaatgactggtccctcaatattacttacttatattattatagggttcatgttatttatgttcatgcgtggattgggagaaattattattcaaaatacgaatttcaaatcttttgctgacgtgaccaacacatatataggaccgttcgcaggatttgtaacgggttggacttactggctatgttggattattactggtatggctgaagtgactgcagttgccaaatatataagtttttggttcccagacatacctaattggattagtgctttattctgtgtacttattctaatgtctttcaatttattaagtgcaaagttgtttggtgagcttgaattctggttcgcaatcattaaaatagttacaatcattgctttaatcgttataggtgtaatcatgattttattcgcattcaagacaccatttggtaacacaagtttaactcatttgtatcaacatggaatttttccaaaaggagcttctggattctttatgtcattccaaatggcattgttctcatttgttggtattgaaatgattggtgttactgcaggagagacaaaagatccagaaaaaactatacctaaagctatcaatagtgtacctattagaattttaatcttttatgttggtgcattagcagtcatcatgtccattattccatgggataaagtagatccagataatagtccattcgttagattgtttgcattaattggtataccgtttgcagcaggaataattaatttcgttgttttaacagctgctgcctcttcatgtaacagcggtattttctcaaacagcagaatgctttatggactttcaaaccaaaatcaagcaccaccaacatttgctagtactaataaacatggtgtgccacataaagcaatcattgcatcatcagctttattgttaattgcagcactactgaattacatattccctgatgcaacacttgtatttacttatgttactacgatttctacagtattatttgttgtggtttgggcattaattattattgcttatattaactatagtcgtaaaaatccagaacttcataagaaagcgacatataaactaccaggcggtcaatacatgggataccttatacttattttctttgtttttgtatttgccttgttatttataaatgttgatacaagaagagcgatttactgcacgcctatttggtttattttattaggtttaatgtacttaagatacaaaaaagctgataaagaatcacgataa

SEQ ID NO: 9262 - DNA, 1758 bp, Staphylococcus epidermidis
atgagaaagactaaaattgtatgtacaataggaccagcttcagaatcagaggaaatgctcgaaaaactaatgaatgcaggaatgaacgttgcgcgtttaaatttctcacatggtagtcatgaagaacataaagcaagaattgatacaattcgtaaagttgctaaacgtttaaataaaacaattggcttgttattggatactaaagggccagaaattcgtactcacaatatgaaagatggacttattgttttagaaaaaggcaaagaagtcattgtaagcatgaatgaagttgaaggaacacctgaaaaattctctgtaacatatgaaaatctaatcaatgatgtcaatattggatcatatatactattagatgatggtttagttgaacttcaagtcaaagaaattaacaaagataaaggcgaagttaaatgtgatatcttaaatactggtgaattaaaaaataaaaaaggtgttaacttacctggtgttaaagttaatttacctggtatcactgataaagatgccgatgatatcagatttggtataaaggaaaatgtagactttatagctgcaagttttgtaagacgtccaagtgatgttttagatatccgtcaaattcttgaagaagaaaaagcagaaataacaattttccctaaaattgaaaaccaagaaggtatcgataatattgaagaaattcttgaagtatctgatggattaatggtagcacgtggtgatatgggtgttgaaattccgccagaaagcgtaccaatggttcaaaaagatttaattagaaaatgtaataaattaggaaaacctgtaattactgcgactcaaatgcttgattctatgcaacgtaatccacgtgcgacacgtgcagaagcaagtgacgtagctaatgcaatatacgatggtactgacgcggtaatgttatcaggtgaaactgcagcaggtcaatatcctgaagaagctgttaaaactatgcgtaatattgcagtttctgctgaagcagcgcaagactataaaaaattattaagtgatcgtactaaattagttgaaacttcattagtaaatgcaattggtgtttctgttgcacatactgccttaaacttaaatgtaaaagctattgtagcagcaactgaaagtggttcaacagcacgtacgatttctaaatatcgtccacattcagatatcattgctgtaacacctagcgaaaaaactgctagacaatgtgcaattgtatggggagtaaatccggtcgttaaagaaggacgtaaaacaactgatgctttactaaataatgctgtagcaacagcagtagaaactggtagagtttcaaacggagatttaattattattactgctggtgtacctactggagaaaaaggaactacaaatatgatgaaaatccacttagtaggtgatgagattgctaaaggtcaaggtgttggtagaggatctgttgtaggccatgcaattgtcgcagatagtgctagtgatttagaaggtaaagatttatctgataaagttattattacaaattctgttgatgaaacattagtaccatatgttgaaaaagctataggtctaattacagaagaaaatggtattacttcaccaagcgcaattataggtttagaaaaaggcatacctactgttgttggtgtagaacaagcaaccaaagaaattaaaaatgatatgttagtgactttagatgcgtcacaaggtaaagtgtttgaaggttatgctaacgtcctttaa

SEQ ID NO: 9263 - DNA, 924 bp, Staphylococcus epidermidis
atgaacgctgctgttcgtgcagtgactcggacagcaatttacaataatattgaagtttatggtgtttatcaaggttaccaaggtttacttgatgatgatattcataagcttgaattgggttcagtaggggatacaattcaacgaggaggaactttccttttttccgcaaggtgccctcagttcaaagaagaggatgtacgtaagaaagctattgagaatttacgtaaacgtggtatcgaaggtttagttgttattggaggagatggcagctatagaggggcacaacgaattagtgaggaatgtaaagaaattcaaacaattggtattcctggtacaattgataatgatattaatggtacagattttacaattggttttgatactgcattaaacactattattgaatcagtcgataagattagagatacggcatcaagtcacgcaagaacgtttattgttgaagttatggggcgtgattgtggagatttagctttatgggctggattatctgtaggtgctgaaacgattgttttaccagaagtcaatacagatattaaggatgtagctgaaaagattgaacagggtattaaaagaggaaaaaaacattctatcgttatggttgcagaaggttgtatgagcggccaagaatgtgcagatgagttaacgaagtatattaacattgatacacgagtatcagtgttaggtcacattcaacgtggcggtagcccatctggtgctgatcgagtattagcttctcgacttggtggatatgctgttgaactattaaaacaaggcgagacagctaaaggtgttggcattagaaataatcaattaacttctacgccgtttgatgaaatttttgctgaaagtgatcgcaaatttaatagtcaaatgtatgaattagcaaaagaattatcaatttaa

SEQ ID NO: 9264 - DNA, 945 bp, Staphylococcus epidermidis
atgttagattttgaaaaaccactttttgaaattagaaataaaattgattctttaaaagaatcccaagaaaaaaacgaagttgatcttcaagatgaaatagatatgctggaagcatcattaaaaagagaaactacaaaagtgtacactaatctaaaaccttgggatcgtgttcaaatcgctcgtttaccagaaagaccaaccacattagattatattccctatatttttgattcatttattgagttacatggcgatagaagttttagggatgatccagcaatgattggtggaattggttacttagatggtaagtcagtaacagttataggccaacaacgtggtaaagacacgaaagataatatttatcgtaattttggtatggctcacccagaagggtatagaaaagctttgcgtttaatgaaacaagcagagaaatttaatcgtccaatatttacttttatagatactaaaggtgcttatccgggtaaagcagctgaagaaagaggtcaaagtgaatcaattgcaaaaaatttgatggaaatggcttcattaacggtaccagttattgctgttgttattggtgaaggcggaagtggcggcgctttaggaattggaatctcaaatcgtgttctgatgcttgaaaatagtacttattcagttatttcacctgaaggagcagctgcacttttatggaaagatagtaacttagctcaaattgccgctgaaactatgaaaatcactgcgcttgatttactagatttaggtattatagatgaagtgattaatgagccacttggtggtgcacaaaaagatgaagaagtacaagctttatcaattaagaaaatgttccttaaacatttaaatgaattaaagcaactcacacctgaagaattagcaaatgatcgttttgaaaaatttagaaaaattggttcagttgtggagtaa

SEQ ID NO: 9265 - DNA, 858 bp, Staphylococcus epidermidis
atgtttaaagatttttttaatcgaagtaagaaaaagaaatatttaacagttcaagattctaaacaaaatgatgtacctgctggtataatgacaaaatgtcctaaatgcaaaaaaataatgtatacaaaagaattgaatgaaaatttaaatgtatgctttaattgtgatcatcatatagctttaaccgcatataaaagaatagaagcaatttcagacgaaggatcatttatagaatttgatagaggtatgacatctgctaacccattagactttcctgggtatgaagaaaaaattgaaaaagatcagcagaagactggacttaatgaagcgttagtgtctggtactgcgaaattagacggaatacaatatggtgtcgcagttatggatgctcgttttagaatgggaagcatgggctctgtagttggtgaaaaaatatgtagaattattgattattgtacagaacatcgtttgccatttattctgttttctgcgagtggtggagctagaatgcaagagggaattatttctttaatgcaaatggggaaaacaagtgtttctttaaaaagacattctgatgcaggactattatatatttcttacataactaatcccactactggaggggtttctgcaagttttgcttcggttggagatattaatttaagtgaacctaaagcactaatcggatttgctggtagacgtgttatagaacaaacaattaatgaaaagttacctgatgatttccaaactgctgagtttttattagagcatggtcaacttgataaagtcattcatcgaaaagatatgcgtgagactttatcaaatattttaaaaatccatcaagaggtgagtaactaa

SEQ ID NO: 9266 - DNA, 1230 bp, Staphylococcus epidermidis
atgtctttaagagatgacgctttagaaatgcatagagagaaccaaggtaaactagaaattacaccaaatgttaaagtgacaaataagcaacaattaagcctagcatactcacctggcgttgcagaaccttgtaaagaaatccatgaagattcaagaaaagtatatgagtacactattaaaggaaatacagttgctgttgtaacggatggaacagctgttctcggtttagggaatattggagcagaagcaagtattccagtaatggaaggaaaggcagcactgttcaaaagttttgcgggtattaatggtgtgccaatagctctagatacaactgacactcaagaaatcataaaaacagtaaaacttattgcaccaaactatggtggaattaatcttgaagatatatcagctccccgctgttttgaaattgaagaaaccttaaagaaagagaccaatatacctattttccacgacgatcaacatggtacagctattgttactatggctgggttaatcaacgctttaaaaattgtagataaagagttaacgaatataaaagttgtattaaatggttcaggtgcagcaggtatcgctatagtgaagttacttcatgcttatggtgtgaataatatgattatgtgcgattcaaaaggtgctatttattctggcagaaattttggtatgaatgatacaaaaacatatgtagctaagtggacgaataaagataaagttgaaggttcacttgaagaagtgattaaagatgcagatgtttttctaggtgtatctgtagcggatatattaactcaagatatggtgaagacaatggctgatgatccaattatttttgctatggctaatcctaatcctgaaatcaatcccaatgaagccaaacaggcaggtgcaaaggttgtgggtacaggtcgatctgattttccaaaccaaattaataatgtattagcatttccaggtctttttagaggtgcattggatgttgaagccactcatattaacgaagatatgaaaaaggcagctgtagaagctatcgttcatttaatagacgaaaatgagttacatcctgattactgtataccaggaccgtttgataaaagagtagctccatcagtagccaaaaatgtagctaaagctgctatggaatccggtgtagcaagaattaaaattgatacacaagaaatatttgataaaactatgaaacttactgacttaaaatag

SEQ ID NO: 9267 - DNA, 3198 bp, Staphylococcus epidermidis
atggtagcacatttaaatattcatacttcttttgacctgttagattctagtttaagaattgatgcattaatagataaagctaaaaaagaaggatatcgtgcgcttgcaataaccgatacaaatgtattgtacggttatccaaagttttatgatgcttgtattgcagctcacatacatccaatctttggtatgactatatatttaacggatggtctctatattattgaaacggttgttttagcaaaaaataatcaaggactcaagtcattatatcaaatttcttctgctataatgatgagaaataaagaagaagtgccaattgaatggctaaaaagatacgaagaacatttaattatcatatttaaagaggctgagttgtctcataagcaaattattgatgcttttgaaggtaagaaagaattatatttaaatcacaatagtaataatacattgactggcaaacgtgtatggatgcaatctgcaagatacttaaatgaagatgatgctgaaaccattccagcgttacatgccataagagataatactaagttagatttaatacatgagaaagaaacacttgatgaacattttcctagtatagaagaacttcaaacactaaatcttagtgaagatatgattactaacgcgaatgaaattgaagaattatgccaagcagaaattgcataccatcaatccctgttgccacaatttgtgacacctaatggtgaaacttcgaaagattatctttggacgatacttatacataggttacgagaatgggaacttaatgataaaacttatttcaatcggttgaaacatgaatataaaattattactgatatgggtttcgaggattattttcttattgtaagtgatttgattcattttgctaaaacacatgaagtgatggttgggccaggtcgtggttcatcagcagggtcattagtaagttatttattaggtattactactatagacccgttaaaatataatcttttatttgaaagatttcttaatcctgaacgcgtaactatgccagatattgatattgattttgaagacacgagacgtgaaaaagtaattaagtatgtacaagataaatatggtgaacatcatgtatcaggtattgtgacatttgggcatctgttagctcgtgctgttgctagagatgtaggaagaataatgggatttgatgaaacgagtttaaatgagatttcaaaacttattccacataaattaggtataactcttgaagaagcataccaaaagccagagtttaaagcatttgttcatcgtaatcatagaaatgaacgttggtttgaagtgagtaaaaagttagagggattaccaagacatacgtctacgcatgctgcaggtatcattatcaatgatcaaccattattcaaatttgccccattaacaactggtgatacaggattattaacgcagtggactatgacagaagcggaacgtataggattattaaaaattgatttcttgggattacgcaatctatcaattattcatcaaattattttacaagttaaaaaggatttaaatataaatattgatatagaagctataccttatgatgataaaaaagtttttgatttattatcaaacggtgacactacaggtatatttcaattggaatcagacggtgttagaagcgtattaaaaagattgcaacccgaacattttgaagatatcgtagctgtcacatcattatatagaccaggaccaatggaagaaataccaacttatataacccgtagacataatcctaaccaagttgcttatttacatccagatttagaaccaatcttaaaaaacacatatggtgttatcatttatcaagaacaaataatgctaatagcaagtcaagttgctggttttagttatggtgaagcagatattttaagaagggcaatgagtaaaaagaatcgtgcaatcttagaaagtgagcgtcaacatttcattgatggtgcaaaaaataacggttacggtgaacagataagtaagcaaatttttgatttaatacttaagtttgcagattatgggttcccacgtgcccatgctgttagttactcaaaaattgcatacattatgagctatttaaaagtgcactatcctcattatttttatgcaaatatcttgagtaatgtaataggaagtgaaaaaaagactgcagctatgattgacgaagctaagcatcaaagaattagcatcttgcctcccaatattaatcaaagtcattggtattataaggcaagtaataaaggaatatatctgtctttaggtacaattaaaggaattggatatcaaagcgttaaattaattattgatgaacgtcagcagaatggaccttatagagatttctttgatttttcaagacgtataccaaaaagggtgaaaaatagaaaattacttgagtctcttatcttagtaggcgcattcgacacttttggcaaaactagagcgacattattacaagcaattgatcaagtattagatttgaattctgatgttgagcaagatgaaatgcttttcgatcttttaactcctaaacaatcgtatgaagaaaaagaggaactacctgatcaattattaagtgattatgaaaaagaatacctaggattctatattagtaaacatccagttgaaaagaaatttgaaaagaaacaatatttaggcatatttcaattgtctaatggaagtcactaccaacctatacttgttcaatttgaccatatcaaacaaataagaacgaagaatggtcaaaatatggcatttgtaacgatgaatgatggaagaacgatgatggatggagtgattttcccagataagtttaaaaaattcgaaacttctatttcaaaggaacagatgtatatcgtattaggtaaatttgaaaagcgtaaccaacaaatgcaacttatcatcaatcaactttttgaagttgaagcgtatgagcaaacaaaattgtctaattcgaaaaaagttattttacgtaatgtaacacatctagaaccacaatttgaacattcaaaagtagaatctaatgaacaacatgcattaaatatttatggttttgacgaaagtgcaaataagatgacaatgttgggacaaattgaacgtcaacgtcaaaattttgatctattaatacaaacttattcgccagctgatattagatttatttaa

SEQ ID NO: 9268 - DNA, 939 bp, Staphylococcus epidermidis
atggaagtaaaaatgaatgaaataatggaagcattagaacaaagtgaattaattattattcacagacatctaagacccgatccagacgcatatggttcgcaattaggtttgaaatattacttacaaaagaagtttccaaacaaacaaatttatgcagtaggagctaatgaagattctttgaaattcataggtttgatggacgaaattgacgatgatatgtacaagaaagcgactgtagttgtatgtgatacggcaaatgcgccaagaatagatgaccaacgttatgatacaggtaccaaacttttaaaaattgatcatcatcctgctactgatcagtatggagatattaactatgttaataccaaagcttcttccactagtgaaataatttacgaattcattttacatttcaacgatgaacatatcattgatgaacaagttgctagagtattatatcttggcatcgtcggtgatactggacgttttttatttaataatacaacgccacgaacaatgcaaattgctggaaaattacttacatatccttttgatcacaaccaagaattaaacaaaatgtctgaaaaggatccaaaactattaccatttcaaggatatatattgcaaaattttgatttaaatgataaaggattttgcaaagttaaaataactaaagacatacttgaaaaatttcaaatacaacctaatgaagcgtctttatttgtaaatacaatcgcagatattcgaggattaaaaatatggatgtttggcgttgatgaaggagatcaaattagatgtcggttgcgttctaaaggtcatattattattaatgatgtcgctaatacatttggtggtggtggacatccaaatgcatctggagtttcagtaaatagttgggagcaattcgagcaactcgccgaagctttaaacgacaagttataa

SEQ ID NO: 9269 - DNA, 1299 bp, Staphylococcus epidermidis
atgacaaagaatgaacaaataattaaacatatcgaatctttatcaattggctctaaaatctctgtacgaaagattgctaaagatcttaatgtgtctgaaggtactgcgtatagagcaattaaagatgcgagtcaacttggaattgtagcaactattgacagagttggtactgttagaatcgagaaacgaagtagggaaaatttagataacttaacgtttaatgaaattgcaaatattgtcgagggccaaatacttgccggtagagctggacttaataaatcagtttcaaaatttgcgataggagcaatgcaatttgatgatattctgaaatatataggcaaacacacattattaattgttggaaatagagaaaatgtacagattgaagctttaaaacgtgaaacttcaatactcatcacaggtggttttcgtccaagtgctgaaattatacgttatgcagatgagcatgaattaccaattatttcttcaagttatgatacattcttagttgctaatatcatcaataaagcaatgtttaatcaaaaaatacgcaaagaaatacttgtggttgaggatatagttaaaccaatcaatgaactatcagtgttatttgattcaatgacaatacatgattacaaaaaaatagcgaatgaaaccggccatacaaggtttcctatagtaaacgaagaatttaaattagtaggtatagtaactagtagagaaatcattaatatgaacgaagaagacctattaggtaaagttatgactaaaaatccattgagtgttaaattaacaaatacggttgctagttgtgcccatttattaatttgggaagggattgaattattaccagtaactgataataataaaaaagctgtcggtgtgattaacagacaggatgttttaaaatcaatgcaattattaggtagacaacctcaaattggtgaaacagtcaatgatcaaattgccaaacatatttcaatacatcaacaaggaataaatgtcgacgtatctccactcattacaaatcattacggtacactaagtaaagcagtatttgttggaattattgaggaaacgattcggcacgaaatgagaaagtataaaaaaggtaatgtcatgatagaaagtatgagtattatctatattaagactgtaccaattgaatctactattgaagtacattatgaaatgttagatgttggccgatattttgctaaattagaagttactatgattaataatggtgaaaaagttgctaatgcattagtaatttgtcaaatgtttgatggattttaa

SEQ ID NO: 9270 - DNA, 414 bp, Staphylococcus epidermidis
atgtataaacatattctacttggggtagatactcaaattaaaaatgagaaagctcttaaagaggtgtctcgtttagctggtgaaggaactatcgtcacagttttaaatgccattaatgagcaagatgctcaagcgtcaatcagagctggcgtacatttagataagctaaccgaaaaacgttctaaaggtttagaaagtacacttaaaactctagaagactacggcattgattatgatgaagttattgtaagaggcaatgctaaggatgagctattaaaatttgcaaatagtggtaaatatgaaattattgttctaagtaaccgaaaagctgaagacaataagaaatttgttttaggtagcgtaagtcataaagtagctaaacgtgctactattcctgttttaattgttaaataa

SEQ ID NO: 9271 - DNA, 1809 bp, Staphylococcus epidermidis; identical to SEQ ID NO: 6371

SEQ ID NO: 9272 - DNA, 708 bp, Staphylococcus epidermidis; identical to SEQ ID NO: 6370

SEQ ID NO: 9273 - DNA, 1425 bp, Staphylococcus epidermidis; identical to SEQ ID NO: 6369

SEQ ID NO: 9274 - DNA, 1059 bp, Staphylococcus epidermidis
atgtcgacgataaaaaatatcgatggaccaaaggattttgtttttagagtgttatcaggggtagcaattggaatagtagccggactcgttccaaatgcaattttgggagaaatttttaaatactttatgcaatatcatcctattttcaaaactttattaggggtcgttcaagccatccaatttacagtgccagcgcttattggagcattgatagctatgaagttcaatatgacacctttagcaatagctgtagtagcaagtgcctcatatgttggtagtggtgcagctcaatttaaacaaggtacatgggtaattgcgggaattggggatttaattaatacgatgttaactgcatccatcgccgtgttacttattttattaatagaagaacgtgttggtagtatggctttaattgtttttccgacagttgttggtggtttagcagctacaatcggcgtatttactttaccatatgtaaggttaattacaacgggaattggtaacatggttaatagctttactgaattacaaccagtgtttatgagtatgttaatctctatggtgtttagttttataatcatatcaccattgtcaactgtagccatagctattgctattggattatcaggtattgctgcgggatctgcttcaataggtatagcagcgacagaagctgtattattgattggtaccagcaaagttaatcatgtaggtattcctttatcaatatttttcggtggggtgaaaatgatgatgccaaatatggttaaataccctgtcattatgattccgattttcttgacagcggcaatatctggtattgcttcagggattattggtatttcaggaacaaaagaatcagcaggatttggttttatcggaatggttgggcctattaatgcctttaaatttatgcatgttgattctgcatggttaagtttattacttattgtcatcgccttttttgttgtgccgtttctagttgcatggattttagatttaatacttagaagattaattcatttgtatgagaatgatatttttaaatttatgggataa

SEQ ID NO: 9275 - DNA, 1380 bp, Staphylococcus epidermidis
atggcagataaactgcaaagagaattaagcaatagacatatacaattaattgctattggcggggctattggaacaggtttatttcttggtgctggccaatctattcatttagcaggcccatctatcttactaacatacataatagtaggttttgttctctttatgttcatgagagctatgggagaattactgttatccaatttaggatttaaatcgtttggtgacattgctcatcatcatattggttctatggcaggttttatggtggggtggacatattggttaacatggattatttcaggaatggcagaagtgactgctgttgccaagtatgtttccttctggtatccaacaattccaaactggttaacagctgcaacgactattttagttttagttgctttaaatctattcagtgctaaattatttggagaattagaattttggctatctattattaaagttttgactattttagctttgatagccgttggtgttgttatgattgtatttggaatgaagacaagctatggccctgcaacggtaacgaatatatggaaagacggaggctttttccctaatggtgcacaaggtttcttcatgtcattccaaatggcaattttctcatttattggtattgagttgattggaataactgcaggggagactaaagatcctcacaaaacaattcctcaagcaattaataatgtaccgtttagaatattattattttatataggatcgttggcagttatcatgtctgttgtaccatggcaacaattgaatcctgctgacagtccatacgttaaaatgtttggattagttggaatcccttttgcagcaggtattattaactttgttgtacttacagctgcagcctcttcttgtaatagtggtatatttgctaatagccgtacgatgtttggattagctggaagaaagcaaggtccagcattcttacatagaaccaataagcacggcgtaccacattatgctattttagtgacatgtggcttattaagtatttcagtcgtgttaaatgcaatttttaaagatgcgactaaagtgttcgtacaaattacaacattttcaactgttttaaatattatgatttggacaattattatgatcgcgtatctaggttatttaagacatgaaccgaaacagcataaagaaagtaactataaaatgtggggcggaaaatacatggcttacagtattttagggttctttgcatttatttttattatactattgattaatagtgcaacgcgttatgccgtactttctgcacccgtatggtttgttatcatgctattgatgtatcaaaaatataaaaaagaatctcgcaaagctaaaattaaaaatgaggaagagtaa

SEQ ID NO: 9276 - DNA, 858 bp, Staphylococcus epidermidis; identical to SEQ ID NO: 6366

SEQ ID NO: 9277 - DNA, 1065 bp, Staphylococcus epidermidis
atgtacaaattagttaagcctttattattcaaattagatcctgaacgagcacatggtttgaccatcaatgcgttgaagtgtgttcaaaaatgttcacccattttacctatcgttaataagttatttacttataacaatccaatattaacgcaacacattcacggtatttcttttgataatcctatcgggttagctgcaggttttgataaatcttgtgaagttccaaaagcacttgaaaacattggcttcggtgcaattgaactcggcggtataacacctaagcctcaaccaggtaatccaaaaccacgcatgtatcgtttactagaagatgatgcactcatcaatcgtatgggattcaataataagggtatgaataaagcactaagtaatttacgtaatcattcatgctcaataccagtaggattaaatgttggtgtgaataaaacaacttcctatgaaaatcgctatcaagattacattaaagtgattgacacatttaaaaatgacgtctcattctttacagtgaatattagctccccaaatacagaaaatctccaaaactttcacgacgaagatgaattttcgatgttatgtgatgctttaaattcatttaaagctaagaacaatattaatgtacctatctttttaaagttaacatctgatatggaattagatggttttaaaaaaatcttgccttcaattacagatacattcgatggggttatgttggcaaatacgacacgacaacgcgatggattaaattcaaaaaataaaatacaaaaaggtggcttgagtggcagaccattattccaaagaaacttacaactggttaaatatgcctatcaacaaacacgaggtaacttcttaattattggaactggtggtatattcagttctgaagatgctatcaaaatgttaagaaacggtgcatcattactacaaatatactcttcattagtcattgaaggaccaggtttgactaagaaaatgaataaagaaattgcgcattatttaactcgacatggttatgctaatgtaagtgatattattggtttagatgcataa

SEQ ID NO: 9278 - DNA, 270 bp, Staphylococcus epidermidis; identical to SEQ ID NO: 6364

SEQ ID NO: 9279 - DNA, 156 bp, Staphylococcus epidermidis
atgtataaagactataacatgactcaacatactctactaatggaaacttcagttcttatccctacgaatgatatttcacgacatgtaaatgatattgcagaaacaattcccgatactgaattcgatgaattcagacattatcgtggcttaatataa

SEQ ID NO: 9280 - DNA, 717 bp, Staphylococcus epidermidis; identical to SEQ ID NO: 6167

SEQ ID NO: 9281 - DNA, 1332 bp, Staphylococcus epidermidis; identical to SEQ ID NO: 6168

SEQ ID NO: 9282 - DNA, 1011 bp, Staphylococcus epidermidis
atgcattgtccgaattgcggtaatccaatagaagatgatgatttattctgtggtgaatgtggacataaaataagtcgacatccacagtcagtcagaaatgcagaaagtgaaataacaaaagctgaaaagaatgatgaagaacaaaacataacatcaaataataaagaaaacaacgcagcgactcatcaaaatgttgattcaacatctcatgatgagactagatcaaatgaaaatgacgtagcagattcaacattacaatctaaacagtcacataatgatacccaacaatcaaatctctctacataccaccaaagacctcaacatcgagaaattcctcaaaatcaacacaatcacgatcaacaacaaagtcaaataggtcaacaagctaaacaagtaacaaatgaaagtaaaggtttctttaaaagtgcatttactgcacctgataaaatcattcaaactaatcatgttttcagttttaaattattattatcattattaataatcggttttattgtattagcaattttactcgcttctgtaataccagttgagattggtattttcggtactacaagaggaagtttggtaacgagtatcatttttggtattattctatttttggttgtcatagtaggtgcaatatttgggcttacacgtttagtagttagacaacctattgcatttaaaaaagtattatcagactatgtgttaattaatagtgtttcgttagcaattttaattatttctgtaattttaatattagcagaatcatacagctttggcggaagtatagcattattgtctttattattatttattgcttctggtatttatctaattgcgaagtatagcactggtaatcaaacaagaatatccagcttttatggtgtgattatttatatcattattttgttcttatttattcgtatttttggggaggcatttttccatcaaatatttggtgattttatagaagaactaggggatttatttgaaggaggaacttattaa

SEQ ID NO: 9283 - DNA, 387 bp, Staphylococcus epidermidis; identical to SEQ ID NO: 6170

SEQ ID NO: 9284 - DNA, 861 bp, Staphylococcus epidermidis
atgactaaagttattacaacaattaatgaaatgcaatctattgttaagcaacatcaacgtgaaggtaaaacaataggattcgttccgactatgggagctttacatgatggtcatttaaccatgatgaagcaatctgtaagcgaaaatgatctcacggttattagtatatttgtgaatcccttgcagtttggacctaatgaggattttgatgcttatccacgtcaactcgatgatgatgtggctgcagtaaaaaagttacaagtggattatgttttccatccgagtgtagatgaaatgtatccagaagaattaggtattcatctgaaagttggacacttggcacaagtattagagggagcacaaagacctggacacttcgaaggtgttgtgaccgtggtcaacaaactatttaatattgtgcaaccagattatgcctattttgggaaaaaggatgcacaacaattagctattgttgaaaagatggttaaagactttaatcttcctgtacatgttatcggcattgatatcgtaagagaaaaagatggtttagccaaaagctctagaaatatttacttgacctctgaagaacgaagagaggcaaaacatttatatcaaagtctacgcttagcaaagaatttgtatgaagcgggtgaacgagatagcaatgagattataagtcaaatcgctgcgtatttaaacaaaaatattagtggatatattgatgatttggggatttatagttatccaaatcttatacaacaatcaaagattcatggacgaatattcatatcattggcagttaaattttctaaagcaagattgatagataatataattattggagatgactatattgattag

SEQ ID NO: 9285 - DNA, 819 bp, Staphylococcus epidermidis
ttgaaaactttaaatcatttaaacaaaatgaaggcatcacagcaaaagatttctatggttacagcttatgattatcctagtgctaagcaagcacaacaagctgaaattgacatgattttggtaggagattctttaggaatgacagtgttaggatatgatagtactgttcaagttacattgaacgatatgattcatcatggtaaggctgttaaaagaggtgcttcagatacatttatagttgttgatatgcctatagggactgttggtttaagtgatgaagaagatttaaaaaatgcacttaagctttatcaaaacacgaatgctaacgctgtcaaagtagaaggggctcatcttacatcatttattcaaaaagcaactaaaatgggtatacctgttgtttctcacttaggtcttacacctcaaagtgtaggtgtaatggggtataaacttcaaggggatacaaagacagccgctatgcaacttatcaaagatgctaaagctatggaaactgctggtgcagtagtactggttttagaagccatacctagtgatttagctcgagaaattagtcagcaactcactattccagttataggtataggggcaggaaaagataccgacgggcaagtgttagtgtatcatgatatgttaaattatggtgttgatcgacacgctaagtttgttaagcaatttgcagacttttcaagtggtattgatggattaaggcaatataatgaagaagttaaagcagggacgtttccttctgaaaatcatacttacaaaaaacgtattatggatgaggtagagcaacatgactaa

SEQ ID NO: 9286 - DNA, 870 bp, Staphylococcus epidermidis
atgacaattgccattataggcccaggtgcagtgggtacaacgttagcttttgaattaaaaaaagttctaccagatacggaactcatcggccggcaagataaattaatgacctatttcccagaaaatacttcaaatggaagtgatgttaaagtgacttcatttaatcatattaatcaaacttttgatgtcattatcatagcagttaaaacacatcaattggatgacgtcattaaacaattacctaaaatcactcatgacgattcgctcattatcttagcacaaaatggctatggacagcttaataaacttccatatcaacatgtctttcaagcagtcgtctatattagcggacaaaaagttaacaacaatgttcaacatttcagagattaccaactatatattcaagatagcacactaactcgtcaattcaagcaaatggttcatccttccaaaatagaggtggttttacaagaaaatattgaaaaaagcatttggtataaattattagtgaatttaggtataaataccatcactgctattggacaacaaccagctaaaattttaaaatctcctcatattgagtcgttgtgtcgtcgtatattagttgatggtcttaaagttgctagagctgaacaaattgactttgaagatcatatcgttgatgatattttaaatatttataaaggttatccagacgaaatgggaacaagtatgtattacgatgtcattaacaagcatcctcttgaagtcgaggccatacagggttatatatataaatgtgcaaaaaaacatcatttagagacaccctatctagatatggcttatacatttttatacgcttatcaccttgaatacacacaaccagattga

SEQ ID NO: 9287 - DNA, 705 bp, Staphylococcus epidermidis
atgactaatgtattatatcaacacggaacattaggaactttaatggcaggtttattagaaggaactgcttcaattaatgacttattagaacatggtgatttaggtattgctacgcttacaggttctgatggagaagtaatttttgttgatggtaaagcttatcatgcaaatgaacataaagaatttatagaattgacaggcgacgaaatgacaccatatgcaactgttacaaaattcaaagcagactcaagttttaaaacatctaataaaaatcaagaagaagtattcgatgaagttaaaaaacaaatgaaaagtgaaaatatgttctcggcagttaaaatttcaggaacgtttaaaaaaatgcatgtacgtatgatgcctggtcaagaacctccatacacacgtttaattgattcagctcgtagacaacctgaagaaacacgtgaaaatatcaaaggttcaatcgtaggtttcttcactccagaattattccatggtattggttctgcaggtttccatattcactttgcaaatgatgatcgtgattttggtggtcatattttagactttgaagtggatgatgtgactgttgaaatacaaaactttgaaacatttgaacaacacttcccagtagatgctaaatcatttactgatgctgacattgactataaagatatagccgatgaaatcagagaagctgaataa

SEQ ID NO: 9288 - DNA, 1665 bp, Staphylococcus epidermidis; identical to SEQ ID NO: 6175

SEQ ID NO: 9289 - DNA, 951 bp, Staphylococcus epidermidis; identical to SEQ ID NO: 6176

SEQ ID NO: 9290 - DNA, 882 bp, Staphylococcus epidermidis; identical to SEQ ID NO: 6177

SEQ ID NO: 9291 - DNA, 1452 bp, Staphylococcus epidermidis; identical to SEQ ID NO: 6178

SEQ ID NO: 9292 - DNA, 1338 bp, Staphylococcus epidermidis; identical to SEQ ID NO: 6179

SEQ ID NO: 9293 - DNA, 432 bp, Staphylococcus epidermidis; identical to SEQ ID NO: 6180

SEQ ID NO: 9294 - DNA, 879 bp, Staphylococcus epidermidis
ttgaagaaattagcagtgatatgtgcgtttacaatattaatattagctggttgtggtcttggtgatagtgataataatggaagctcaacgataaatgatgatcaacaatcaggatataaaagtaacagagattcaaaatcaagtataagtagaaatcaaacagaagataatcagcaggacacacaacaagatacccattcgaatagatactatgctcaagtttggttaactgctttagatagttatagaggtgaaagtgaccttccttttgacgatttagaaattgtacatcaaaatatttctaataaagttttagatccctatcacccagacgaatcagccaaactacctgaaggaacagaattgttaacagcaagtgttactgcagcaggttcagtttattataaaagtaatggagatggcacaattacaatatatagtgtaccatcacatttccaagggagttggcgtgacgctgattactctaaaagagaatctcaacgcattatagatgatgctcgtacagttaagttatacaacgctagtgaaagtgaaatcaataagataagtcagatgatgaggactgaattttcagttggtgataatttaacagatgaagatgatacttctgaatctgaagatcaatcaagtagttctgatgaagcaacggtgacacgaagtaatgttatcgatatagttgaagactacgaagggcatcaattagatacagacacatatatttacaaagaaccagaaaaagatagcgatggtagttgggggttctcatttacagataaagaaggccatttagaaggatcttatattatcgataaagatggagaagtaacgaagtatgatgaagatggagagccagaataa

SEQ ID NO: 9295 - DNA, 591 bp, Staphylococcus epidermidis; identical to SEQ ID NO: 6182

SEQ ID NO: 9296 - DNA, 189 bp, Staphylococcus epidermidis; identical to SEQ ID NO: 6183

SEQ ID NO: 9297 - DNA, 1362 bp, Staphylococcus epidermidis
atgaaatatattgtggtaggtacatctcattcaggatatgaagtgatccaaacattgcttaaagaagatgaaaatgctgatattcaagtttttgaaagtgcagatcaaccgtcctttttatcttgtggtattcaaagttatcttgaagacatctcatcatcattagatgatttacattacgcatcagttgactcttataaggcacaaggtgtaaatattcatacgaatagcacagttacagatttagatactgacaataagactgttgtagttgaacaccaaggtcaaacagcaacttattcttatgataaattgttcctaagtcctggtggcaaacctgttacccctccagtcgatggaattgaaaaatataaacatgtattatttatgcgtggacgtgattgggcaaatcaaattaaagaacgcatgaaagatgccaaaaaggctgttgtagtcggaggtggctatatcggtattgaagctgctgaagcttttgctaaagcagacatagatactacaatcgtagatgtcgctgatcgtatattaaacacttacttagataaagaatttacagacatattagaaacaaatgcacagcaacatggtcttcattttaaaggtggcgaaacagtaaaatcaatttcaggaaatcaaaatggcgaagtaactactgtagttaccgacaaaaatgaatatgacgcagatactgtcttatttgctgtaggtgtcgaaccagctaccgagtggctaaaagataaaattgatttaggtaagaaaggaattataaacattaaccaccaacaacaaacatctgctaaagatgtctatgcgggtggcgatgcgacattagttccttttgcaccagtatctgaggatcgttatattgcattagcaacaaattcaagacgtcaaggcgttgtcgcagcaaaaaacatgttgggtaaagaaatgacaatgccacgcgtttctggtacttcaggtttacaattatttgattataaatttggacaaactggcattcacggtacagaaatcgataattatgatggcaatttaggtcaaacatacgtagaagaattgattcgtcctcagtttatgcaagatgatacgaaaattcatatgaaaattatttatgataaagacactcaccgtatacttggtggtcaagtcatgtcaaaagaagatattactgcttctattaacacaatttcagtagtaatatctgctggtttcacacttgaacagctcgctgtccaagatttcttcttccaacctgattatgatagaccttggcattatcttaatgtgttagcccaacaagcattgggagatacatttggtagcgataagatgttattctaa

SEQ ID NO: 9298 - DNA, 891 bp, Staphylococcus epidermidis
atgaataaagaacaattagaaaaaatgactcatggtaaaggattcattgctgcattagaccaaagtggtggtagtacacctaaagcacttaaagaatatggtgtgaatgaagaccaatacagtaatgaagacgaaatgttccaacttgttcacgatatgcgtacacgtgttgtaacttcaccttcattttcacctgataaaattttaggtgcgattttattcgaacaaactatggatcgcgaagttgaaggtaaatacactggagactatttagcggacaaaggcgttgttcctttcttaaaagtcgacaaaggtcttgctgaagagaaaaatggcgtacaattaatgaaacctattgatgatttagatgaaactttagatcgtgcaaatgaacgtcatatcttcggtactaaaatgcgttctaacatccttgaacttaatgaacaaggaatcaaagatgttgttgaacaacaatttgaattcgctaaaaaaatcatcgctaaaggtttagtacctattatcgaaccagaagttaatattaatgctaaagataaatctgaaattgagaaagttttaaaagctgaaatcaaaaaaggtttagattcattaaacgatgatcaattagttatgttaaaattaactattcctactgaagctaacttatataaagatttagctgaccaccctaatgttgtacgtgtagtagtattatcaggtggttacagccgagatgaagctaacaaattgttaaaagataacgatgaattaattgcaagcttctcacgtgcattagcaagtgacttacgtgctagccaatcacaagaagaattcgataaagcattaggcgatgctgtagattcaatctatgatgcgtcagtaaataaaaactaa

SEQ ID NO: 9299 - DNA, 924 bp, Staphylococcus epidermidis; identical to SEQ ID NO: 6865

SEQ ID NO: 9300 - DNA, 1500 bp, Staphylococcus epidermidis; identical to SEQ ID NO: 5217

SEQ ID NO: 9301 - DNA, 819 bp, Staphylococcus epidermidis; identical to SEQ ID NO: 5218

SEQ ID NO: 9302 - DNA, 2628 bp, Staphylococcus epidermidis
atgacacaattcgtttatgcatttaatgaaggaaatatagctatgaaagacttacttggtggtaaaggtgccaatctttcagagatgaagagactcggactaccagtaccagatggttttacaattacgactgaagcttgtattacatatttaaaacaaaatgaagaactacctacagaagtaaagacacaattaattgatcatttagcagctttttctaaacgaacaggaaaagccttttcctctgatgataacttgttattagtatcagtacgtagtggtgcaaaaatttccatgccaggaatgatggatacaattcttaatttaggacttaatgatgataatgtaaaaaagcttgttgacaaaacaaatgatgcacgatttgcatatgattgttaccgtcgtttactacaaatgtttggagaggttgtttatggtattccaatgacagctttcgatacatattttaatgattttaaaacaaagcatcgttatcaaaatgatgctgaaattccggcagaaggactacaaactatatgtgaaaaatataaagaaatctatgtagaagaggcatataaaccttttccccaagaaccgttaaagcaattagaagaagcaattgaagcagtatttaaatcttgggataatgatcgtgcacgtgtatatagagatttaaatgatattccacatgatattggtacagccgtaaatattcaggaaatggtatttggtaatagtggtgaaaatagtggtacgggtgtagcatttacaagaaatccagttactggagaaaatcatttattcggagagtacttacttaatgctcaaggtgaagatgttgttgcaggcattcgtacccctaaggatattgacactttaaaacaacaaatgccagatgtacatcaagagtttgttgatgtaaccaaacaacttgaaaaacattacaaagatatgcaagacatagaatttacaattgaaaatggtaaactttatttattacaaacacgtaacggaaaacgtactgctaaagctgcaataaaaattgctgtggatttagttcacgagcaattaattacacgtgaagaagcagtatcaaaagtagaagtaaaatcaatagaccaattattacatcctaattttaatgaagaatcattaaagcaagcgacagtggtttctaaaatgggcttaccagctagtcccggtgcagcaacaggaaaagtagtcttctctgctgaagaagcaaaacttcaagctgaaaatggtaataaagtagtgttaatgcgaccggaaacatcacctgaagatattgaggggatggtagcaagtgaagcaatcgtaacaactcatggtggtatgacatcacacgctgctgttgtagcaagaggaatgggcaaatgttgtgtgacaggatgttcgaatgtagagatagatacagtgaacaaaacagtatattatcctgaaggtgaattacatgaaggggatatcgtttctgtagatggttcagctggtgatttatatttaggagcaattgaaacagtcaatgctgaacatagtgaagagttcgatcaatttatgacttggtctgaagagattgcaagactgcaagttagaatgaatgctgaaacaccacaagatataaaagctggatataattttggttctaaaggaataggtttagttcgtactgagcacatgttctttggccctgaacgtttaatagaaatgcgccgttttatcttagcttcaaatcatgacgaacgtgtacaagctttagaaaaaattaaaacataccaagtagaagattttgaaacaattttcagattatctcaagatagacctacgattgttcgtttacttgatccaccgttacatgagttcttaccatcatctgaagaagatataaacaatgtttctcaacagctgaatgtatcttcagagttcttacgcaagcgaatcgttgacttaaatgaggtcaatccaatgcttggtcatcgtggttgtcgtttggctgtgacttatccagagttatatgagatgcaagttgaagctatcattgaaagtgttattaagcttcaaaaagagggcataacgtgcctaccagaaattatgattcctctcgtgtcaacagtagaagaatttacaactttaaaagaacgattagttaatacaattacacatttagaaaaagaatcacaacaagatatacaatatatgataggtactatgattgaaacgcctagagcatgcttgattgcgaatgaccttgcgaaacattgtgatttcttcagttttggtactaatgatttaacgcaattgacatttggtttctctagagatgatgcaggaaaattcataaatgtgtatactgaaaataacattttacagcttgacccattccaaactttagatagagaaggtgtaggacgactaattcaattagctgttgaacaagctaaaaatacaaatccagagataaaaattggtgtatgtggtgagcttggtggcgatgcaaaatcaattcgtaaatttaaccaatgggaaattgattatgtttcatgttcaccatttagagttccgggtgcaattttagctacagctcagagtcaagcggaggaaagcgagcgataa

SEQ ID NO: 9303 - DNA, 1596 bp, Staphylococcus epidermidis; identical to SEQ ID NO: 5220

SEQ ID NO: 9304 - DNA, 447 bp, Staphylococcus epidermidis; identical to SEQ ID NO: 5221

SEQ ID NO: 9305 - DNA, 219 bp, Staphylococcus epidermidis; identical to SEQ ID NO: 5222

SEQ ID NO: 9306 - DNA, 1176 bp, Staphylococcus epidermidis; identical to SEQ ID NO: 5223

SEQ ID NO: 9307 - DNA, 1719 bp, Staphylococcus epidermidis
atgagaagaaaacgcgattcatacgattatgtcatcattggtggcggtagtgcaggttcagttcttggtgcacgcctttcagaggataaagataaaaatgttttggtattagaagctggacgtagtgactatttctgggatttatttattcaaatgccagcagcattgatgttcccatcaggtaatcgtttttatgactgggaatatcaaactgacgaagaaccacatatgggacgtagagtagatcatgcgagaggtaaagtattaggtggctcaagttctattaacggtatgatttatcaacgaggtaacccaatggactatgaaggatgggcagaacctgaaggaatggacacatgggactttgcacattgtctaccatacttcaaaaagttagaaacaacatatggtgcagcgccatacgataaagttagaggccatgatggtccaatcaaattaaaacgtggaccagctactaatccattatttaaatcattctttaatgcaggtgttgaagcgggctatcataaaactgcagacgttaatggatacagacaagaaggttttggaccatttgatagccaagtacatcatggacgtcgtatgtctgcttcaagagcgtatctacgcccagcattaagacgtagaaacttagatgttgaaacacgtgcattcgttacaaaattaatttttgatgaaaataatagtaaaaaagtaacaggcgtgactttcaagaaaaatggtaaagaacatactgttcatgcaaacgaagttattttatctggcggtgctttcaatacaccacaactattacaattatcaggtattggtgactcagaattcttaaaatcaaaaggtatagagccacgtatgcatttaccaggtgttggtgagaacttcgaagatcacttagaagtatatattcaacataaatgtaaacaaccggtttcactacaacctagccttgatgtcaaacgtatgccgttcatcggtttacaatggatttttgcacgtaaaggtgcagcggcgtctaaccactttgaaggtggtggctttgtaagatcaaatgatgatgttgattatccaaacctcatgttccatttcttaccaattgctgtaagatatgatggtcaaaaagcaccagtagcacatggttaccaagtacatgttggaccaatgtactccaactcaagaggtagtttgaaaatcaaatctaaggatccatttgaaaaaccaagtatcgtgtttaattacttatctacgaaagaagacgaaagagaatgggttgaagcaattagagtagcaagaaatatcctaaaacaaaaagctatggacccatttaatggtggcgaaatttcaccaggaccacaagttcaaacggatgaagaaattctagattgggtacgtaaagatggagaaactgcattacatccatcttgtagcgcgaaaatgggacctgcatctgacccaatggcagtagtcgatccattaactatgaaagtacatggtatggaaaatttacgtgtcgttgatgcttcagcaatgcctagaacaacaaatggtaatattcatgcacctgtattgatgttagctgagaaagcagcggacattattcgtggtagaaaaccgcttgaacctcaatatgttgactattataaacatggtattgatgatgaaaaagcaggtgcaatggaagatgatccattctaccaatattaa

SEQ ID NO: 9308 - DNA, 1491 bp, Staphylococcus epidermidis; identical to SEQ ID NO: 5225

SEQ ID NO: 9309 - DNA, 582 bp, Staphylococcus epidermidis
atggattataataacaatgacagtcaatatatcgaagaagctaaagatttagttatcaactcaatcggtgaaaccatggatttgtatggtatcaaccgtagtgtaggtaacttgtatggcattatggtttttgaaggaagtatgacacttgatgaaatgcgacaacaactgcaaatgagtaaacctagtatgagtacaggtgtaaaaaaactacaagaatacgatatcgtcaaacaacaattcacgcgtggtagccgaaagcaacattttattgcagagaaagatttcttcactttcttccgcaacttttttactaaaaaatgggaacgtgaaattgacactaatatggaagcaattgaagatgcagaaaatatcattcacccacttcttgaaaagaatgatatagatgaggaagttaaaaaacaagcaataaatgtaaaagcgcagttagaccactctaaaatatattacaagtggctcgctcaattaagtgaagctctagagtcaggagaaatttttaactatttcccaattccagatgaacaacatcatcatgatcaatcagaaaaagccaagcgataa

SEQ ID NO: 9310 - DNA, 1623 bp, Staphylococcus epidermidis; identical to SEQ ID NO: 5227

SEQ ID NO: 9311 - DNA, 1299 bp, Staphylococcus epidermidis; identical to SEQ ID NO: 5228

SEQ ID NO: 9312 - DNA, 537 bp, Staphylococcus epidermidis; identical to SEQ ID NO: 4723

SEQ ID NO: 9313 - DNA, 1851 bp, Staphylococcus epidermidis; identical to SEQ ID NO: 4722

SEQ ID NO: 9314 - DNA, 306 bp, Staphylococcus epidermidis; identical to SEQ ID NO: 4721

SEQ ID NO: 9315 - DNA, 600 bp, Staphylococcus epidermidis; identical to SEQ ID NO: 4720

SEQ ID NO: 9316 - DNA, 1179 bp, Staphylococcus epidermidis; identical to SEQ ID NO: 4719

SEQ ID NO: 9317 - DNA, 900 bp, Staphylococcus epidermidis; identical to SEQ ID NO: 4718

SEQ ID NO: 9318 - DNA, 612 bp, Staphylococcus epidermidis; identical to SEQ ID NO: 4717

SEQ ID NO: 9319 - DNA, 780 bp, Staphylococcus epidermidis; identical to SEQ ID NO: 4716

SEQ ID NO: 9320 - DNA, 1719 bp, Staphylococcus epidermidis; identical to SEQ ID NO: 4715

SEQ ID NO: 9321 - DNA, 1845 bp, Staphylococcus epidermidis; identical to SEQ ID NO: 4714

SEQ ID NO: 9322 - DNA, 732 bp, Staphylococcus epidermidis; identical to SEQ ID NO: 4713

SEQ ID NO: 9323 - DNA, 120 bp, Staphylococcus epidermidis; identical to SEQ ID NO: 4712

SEQ ID NO: 9324 - DNA, 477 bp, Staphylococcus epidermidis; identical to SEQ ID NO: 4711

SEQ ID NO: 9325 - DNA, 1344 bp, Staphylococcus epidermidis; identical to SEQ ID NO: 4710

SEQ ID NO: 9326 - DNA, 441 bp, Staphylococcus epidermidis; identical to SEQ ID NO: 4709

SEQ ID NO: 9327 - DNA, 750 bp, Staphylococcus epidermidis; identical to SEQ ID NO: 4708

SEQ ID NO: 9328 - DNA, 1326 bp, Staphylococcus epidermidis
ttgatttgttctaattgtggggcacatttagagaaggatgataaattttgtgttaattgtgggcagagtgtgttcgataatccaaagacaaaaactgaacataattttaatagtcaagatagacaatgtccaaagtgtcacaaagtagtaaatgtcgatgataagttttgtatcaattgtggtcattctcttcagcaaacattatcaaattcaaatgacaacatagcatcacatacatattcaaatacaaaacctgaaattgaaaatgaaactgcagatcatattcgattgacagaagaagccaagcatctatttaataacacaacgaaatcaataggtaggctagcagggaatgatgaaagtttaaaattaaatttgcgtgacatgttttctgaggtgtttaaatctcacaccaaagatgaagcggatgatgtatttattgctggaacaaaacgtacgacgccacatattaatgaagtttccgaggagtggggaagaccttgggtgttctcacgtgtatttttagctttaggtatcactttcctagcgttatggatattaacaaatatatttggtaatgccaatgccataccaggtatgatatttattggcgcactattagttcctatttcaggattaatcttcttcttcgaatctaatgcatttaaaaacattagtatctttgatgtaatgaggatgttctttattggtggtgtattatcactcattagtacaatgattttatatcaatttgttacatttagtactgaatcgcaatattatggaattatgactataacagatgcgttcatagtaggatttgttgaagagcttggaaaagcaactgttgttattttatttattaattatttaaaaacaaataaaatactcaatggattacttatcggtgctgctgttggtgcagggttcgcggtgtttgaatcagctggttatatctttaggtttggatttaatttatttgatggagttaataatattactgaaatcactatacaaagaggttggacagctttaggtagtcacctcgtttgggcagctattgttggtgctgcggcagtaatagtgaaagaaacaaagcatttcgaatgggcgaatatcatcgataaacgttttatatttttcttttttgtggcagtgacattacacggaatatgggatacggaaataacacttttaagtagtggttatttaaaatatatcttattaattatgattgcatggctatttatatttatacttatgaaagcagggctaactcaggtgaatcagttgcgtgatgaatacaatcgtttagaggaaaggtga

SEQ ID NO: 9329 - DNA, 1110 bp, Staphylococcus epidermidis; identical to SEQ ID NO: 4706

SEQ ID NO: 9330 - DNA, 1185 bp, Staphylococcus epidermidis; identical to SEQ ID NO: 4705

SEQ ID NO: 9331 - DNA, 1593 bp, Staphylococcus epidermidis
atgaattggatatcgattattttatttattatggtcgtatgtggcatttctttttatgcctatttgcaatcaagaaaaattaaaacgaatagttcagatggttattttatgggaggaaatagccttactggatttacagttgcctctacaattatcatgaccaatttgtcgacagaacaaattgttgggcaaaatggtcaaagctatgcacaaggaatggaagtaatggcttgggaggttacggctgccgtagcagttgtattcttggcctgggtctttcttcctaaatatctaaaatacggtgttaatacaatttctgagtttttggaattacgttatgatacatttactaaacgttttgtctccattttatttatctttacctatgtcgtatctttcttgcctgtagtattgtattctggttccctagtgttcaataaaatgtttaaagttgatgaatacttaggtgtaagtagttcaactgctgtcattattatttcatctattattggtataattggcattatttacttatttataggtggtttatcgttaagtgcttttagtgattcgatttatggcatggctttaattatagctggacttgcgattacaatattaggtctaggtcaattaggagatggcaacttcctacatggtttcgacaaaatcgtgcaagacacgcctgagaaattgaatggttttggtaaggtggactcggatgttgtaccttggccaaccctattcttcggtatgttctttaacaatttattcttctggtgcgcaaaccagatgatagttcaaaaagcactcgcagctaaaaatttaaaagaatctcaaaaaggtgcaatatatttaagcttatttaaagtgttcggacctttatttacagtcttaccaggcgtagtagcatttaactattttaatggtagtcttgataaatcagataacgcttaccctgcacttgtaacttcagtattaccagaatgggcattcggcttatttggtgcggttatttttggtgcaatattgagctcatttgttggctcattgaatagtacaactacactattaacactcgatttctataaacctatttttggaaaaaataaatcagataaacatattgctcgagtaggccatattgctactgtagtcattggagttattgttgtagcacttgcaccagtcatctcattattccctagtggtctttatgcagtagttcaacagtttaatggtgtgtatagtatgccagtgctagctttaattttaatcgctttcttttctaaacgcacatctaaattgggcgctaaagtgacactcttcacacatataattttatacgctataatcagctttgtatttacagaaattaattatctatacacatttagtgtattattctttgtagatttaattattattttgatttttaacaaagttaaactatctagtgagtttgatttaagcacgcaccaaccgaaagtagatatgacgccatggaaatatcgttacgttgcaggtattattgttcttgctttagtagtagtaagttatattatcttctcaccactcgtgttggcaaaataa

SEQ ID NO: 9332 - DNA, 591 bp, Staphylococcus epidermidis; identical to SEQ ID NO: 4703

SEQ ID NO: 9333 - DNA, 2013 bp, Staphylococcus epidermidis; identical to SEQ ID NO: 4702

SEQ ID NO: 9334 - DNA, 750 bp, Staphylococcus epidermidis
gtgttattagaggttaaaaatgtaaaaaaagtctatggcagaggtatgaacacgacaatggctttaaatcaaatgaaccttgaaattgatgaaaatgaatttgtagcaatcatgggagagtcaggttcaggtaaatctacattactcaatttaattgctacttttgatcgtacaactgaaggcttgataaagttagacgggttgccacttaatcaattgaagaataaagacattgcacgttttcgtagagaaatgatgggatttgtgtttcaagattttaatgtgttgaatacgatgtcgaacaaagataatattttgatgcctcttgtacttgcaaatgaacgtccaaaaataatgcaaaaacgcttaatggaaataagtgaacaattaggaattgaagacttgcttgaaaaatatccgtctgaaatatctgggggacaaaaacaacggatagctatagcccgtgcgttgatagcacgacctaaattattattagctgatgaacccactggtgcacttgattcaaaaacctctaaaaaccttatgtgtttatttcgaaaaattaatcaaaagcatcaaactatattaatggtgacacattcaaatattgacgcgtcatatgcgaaccgtgtcatcttcatcaaagatggtcgtttgtatcatgagatttatcgtggtgaagaatcgcaaacagattatcaaaagcgtattgccgatagtttggccatattgaatggagtaggtgactaa

SEQ ID NO: 9335 - DNA, 897 bp, Staphylococcus epidermidis
atgaagtttgcatatattcaatcgattcgtaatgagatttcaattattttaataattctattattttttgcacttatattttatgtgttttctttaccttttgatgcatacgtacttgcaatcagtataatattactattgatgtgtgtacgttggtggataaagtatttaagttttaaaaagaacgaacatcttaaagataaagtagcatatttagaacatgagttagcacatgttaagaatcagcaaattgaatatcgtaacgatgttgaaagttattttttaacatgggtacatcaaattaaaacacctatcactgcctcacaattacttttggagagaaacgaggagaatgtagttaatcgtgttagacaagaaattgtgcacattgataattatacaagtctcgcattaagttatttaaaattattaaatgaagagtcagatatgacaattaccaaagtgacagttgatgatttgattcgcccgttgcttttaaaatatagaattcagtttattgagcaaaagacgcaaatccattataaaaaaagtgaggacattattttaaccgatgcacaatgggcgtctataatgatagagcaacttttaaataatgctttaaaatatgctaaaggtaaagatatttggatagattttgatgttgccaatcaaactctacagattaaagataatggtattgggattagtaaagcagatattcctaaaatttttgataaaggatactcaggatttaacggtagattgaatgaacaatcaactggtataggtttatttatagtgcaacacattgcaaatcatttaaatatacaagtaactgtacaatcagaattgaatcatgggacagtattttttatacattttactaaagaaaaataa

SEQ ID NO: 9336 - DNA, 666 bp, Staphylococcus epidermidis
atgaaaattttcattgtagaagacgatttagtgattgctgaaagtttagctaatgagctatctaaatggaattatgaggtgcatgtggttgataattttgaaaagataatggaagattttcgccgagtagaaccacaactcgtattattagatatcaatctaccaacacttaatggcttccattggtgccaagaaatgcgaaaagtatctcatgtgcctattatgtttattagttcaagaacagataatatggatcaaattctggctatccaaatgggtggcgatgattttatcgagaaaccatttaacttgtctttaacagtagctaaaattcaggcactattgcgtcgcacttatgatttatcaatagctcgtgatgaaatagctgttaaaggttgtaaactaattgttgatgaggccaagcttagcaaggataatgaacatgttcaactttccttaacagagctacagatattaaaattgttatttcaaaatgaaaataaatatgtaagtcgtacagctttaattgagaagtgttgggagtctgagaattttattgatgacaatacgctcgcagtaaatatgacacgattacgaaaaaaattactttctatcggtgtcgatgatttaattgagacaaagaaaaatgtaggatatagggtttga

SEQ ID NO: 9337 - DNA, 180 bp, Staphylococcus epidermidis
atgatatttgtaatgttatctccaatattaattattttgtttattgtactaagcgtattagaagaaaaacgtagaaagaaaaattcaaaagaacaaaattcgaatcatgtagatcagcaacaatatgattataccgacaaagaacaacaacaaaataaaaattcaaatgatgataaataa

SEQ ID NO: 9338 - DNA, 1470 bp, Staphylococcus epidermidis
atgaaatttatgaacaaaatgggtaagacgacgcttgcttcatcaatcgtagcagcatccgttttaagtacggtaaacgtatcatatgcttcaggtagctcagaacaaagtgctcaaactaagcaaacacaaaacgatgccattgctttcggcaacacaaaaaatccaaaaaatgtcatctttatggttggcgatggtatgggaccttcttttaacactgcatatcgctattataaaaataagcctggtgctaagaaaatgactccaactgcatttgataaatatctaaaaggaacaaatcgtacttattctaatgatcctaaagaaaatgttacagactctgctgctggaggaacagcttttagtaccggtcacaaaacatataacggtgcgattagtgttgatacaaataaaaaaccaattaaatctgtgctagaacaagctaaagaacaaggaaaatcaactggtttagtaactactgctgaacttactgatgcaacacctgctgtatatgctgctcatatagattcacgcgacaaaaaagatgaaattgcacagcaattttataatgataaaataaatggcaaacataaagtcgatgtgatgttaggtggcggtgcaaaatacttcggtaaagaaaataaaaatttagcgaaaaaattcaaaaaagatggttatgatatcgtttctaataaagatgaattaaatcaatcacaaagcaagcaagttttaggtactttctcagaaaaagatatgccattacaaatagatgcacctcaatctaatccgttgctagtagacatgcaaaacagtgcactaaataaattaagtaaaaataataaaggattctttttaatggttgagggtgcttcaattgataaagctgcccaccctaatgatatcactggtgtgatgtctgaaatgtctggtttcgaaactgcttttgataatgctattaattatgcaaagacacataaagatacacttgttgtagcaactgcagaccactcaactggcggtctatcaaccgcaaaaggtaaagattataaatggaatccagaggctattcacaagatgaaacattctggaatgtatatgacaaaacaaatcgctgatggaaaagatcctgaaaaagtaattaaagatggatacggtattgatttcccaaataaacaactcgataaagtcaaaaaagcagcagacgagcttcacaaattacaaaaagaaggtaaagatgacaaagacgaaaaagttgtagaacaaacaacaaaattacaaaatgcaattcaaaaaccaattaacgatgcttcacacacaggttggacaaccaatggccatacaggtgtagatgttaacacatatgcatatgggccaggttctaacaaattcaaagggaatatggaaaatacccaaagcgctaaaaacttatttgactttttcggaaacaatgtaacatcaaatcaaaattaa

SEQ ID NO: 9339 - DNA, 1545 bp, Staphylococcus epidermidis; identical to SEQ ID NO: 4696

SEQ ID NO: 9340 - DNA, 2334 bp, Staphylococcus epidermidis; identical to SEQ ID NO: 4695

SEQ ID NO: 9341 - DNA, 141 bp, Staphylococcus epidermidis; identical to SEQ ID NO: 4694

SEQ ID NO: 9342 - DNA, 1338 bp, Staphylococcus epidermidis; identical to SEQ ID NO: 4693

SEQ ID NO: 9343 - DNA, 168 bp, Staphylococcus epidermidis; identical to SEQ ID NO: 5262

SEQ ID NO: 9344 - DNA, 117 bp, Staphylococcus epidermidis; identical to SEQ ID NO: 3773

SEQ ID NO: 9345 - DNA, 132 bp, Staphylococcus epidermidis; identical to SEQ ID NO: 3774

SEQ ID NO: 9346 - DNA, 186 bp, Staphylococcus epidermidis; identical to SEQ ID NO: 3775

SEQ ID NO: 9347 - DNA, 885 bp, Staphylococcus epidermidis; identical to SEQ ID NO: 3776

SEQ ID NO: 9348 - DNA, 1335 bp, Staphylococcus epidermidis; identical to SEQ ID NO: 3777

SEQ ID NO: 9349 - DNA, 987 bp, Staphylococcus epidermidis; identical to SEQ ID NO: 3778

SEQ ID NO: 9350 - DNA, 810 bp, Staphylococcus epidermidis
atggatttttccaatttttttcaaaatctgagtactataaaaattattactagtttactcgatttactgattgtttggtatgtgttgtatcttctcattacagtttttaaaggtactaaagcaattcaattattaaagggaatagttgtcattgttatcggccagcaaatcagtaaaattcttaacttaacagcaacatctaaattgtttgatattgtaattcaatggggtgttttagcactcattgtgatatttcaacctgaaataagaagagccttagaacaattaggtaggggaagttttttaaaacgatatacgaatacttatagtcgcgatgaagaaaagttgattcaatctgtgtctaaagctgttcaatatatggctaagcgacgcattggtgcgcttattgtttttgaaaaagagacaggtttgcaggattatatagaaactggaataccgatgaattcagatatatctcaagagctactaactaatgtatttatccctaatacgccattacacgatggtgcaatgataattcaaggaagtaagattgccgttgctgcaagttatttaccattatcagatagtgttaaaatatcaaaaagtttaggaactagacatagagcggcagttggaatttcagaagtttctgatgcttttactgttgttgtatcagaagaaactggtgatatatcagtcacttttgatggaaaattaagaagagatatttcaaaagatgtttttgaagaattgcttgctgaacattggtttggtgcacactttcaaaagaaaggtgtgaattcataa

SEQ ID NO: 9351 - DNA, 936 bp, Staphylococcus epidermidis
atgcttgaaagtaaatggggattaagatttgtcgctctcatattagcagtttttttctttttatcagtaaataatgtgttcggaaatatttttaatacagatgatttatctcaaaaatcatccaaaactattcaagatgtgcccgttgatgttatctataatagtaaagacctacatgtaactaaaattcctgaaaacgtcgatgttaatttaacaggaccacaatcaaaattaatcaaaattgaaaaccctgaagatttgaaagtagttgttgatctttctggaaaaaaagcagggaaatatcaaaaaaaatatcaagttagaggcatagatagtggtatcaactatcaaattaaacctgaagttgcacacattaaccttgaaaataaaataacacgagttatgcatgtgcaaccagacattagtagtaacagtttagatccaaaatataaaataagtaaacaaagtatttcaccagaaactgtaaaagtgactggtggagagcaacaattaaaaaatatagcttatttaaaagcaacctttaaaaattctagtaaagtgaacaaagacaccaatgatgttgcggatgttagtgcatttgataaacaattgaataaattaaatgtatcaattaatccaaatgaagttaatttaaaagtaacagttgaaccattcagtaaaatggttaaggtacgtacaaaaacaacgggtaagcttaatgaaaataaagaattagatagtgttaaactggaagataaagaagtagaaatctttggtaatagagatgaattacaaaatattaatgaaattactgctgaagtagatattgatggaatttcagaatctacagaaaaaacagtatcatttaacttacctaaagatgtgactaaagtgaatccaaaggaaacaaaagcgtatataaatgttaaaaattga

SEQ ID NO: 9352 - DNA, 1356 bp, Staphylococcus epidermidis
atgggaaaatattttggaactgatggtgttcgtggtgtcgctaaccaagaactcacacctgaattggcttttaaactaggtagatacggaggatatgttctcgcacataataagggtgaaaagcatcctcgagttttagtaggaagagatacaagagtatcaggagaaatgctagaatctgcattaattgctggtttaatttcaattggcgcagaagtgatgcgcttaggtgttatttcaacaccgggtgtggcttatttgactaaagaaatggaagcagcattaggtgttatgatttctgcgtcacataatccggttgctgataatggaattaaattttttggttcagatggctttaaattgtcagatgatcaagaaaatgaaattgagcaattattagatcaaaccaatcctgatttaccacgtccagtaggagaggatattgtacattattcagattattttgaaggtgcacaaaagtatctaagttatcttaaatcaactgttgatgttaattttgagggtcttaaaattgtattagatggtgcaaacgggtcaacttcttctttagccccattcttgtttggcgatttagaagcggatactgagacaattggatgtaatccagatggttataatattaatgaacaatgtggctctactcatccagaaaaattagctgaagcggtgttagaaactgaaagtgactttggtttagcttttgatggagatggcgatcgtattattgcggtagatgaaaatggacaaattgtagatggagatcaaattatgttcattattggtcaagaaatgtataaaaaccaagaactcaatggaaatatgatagtttcgacagtaatgagtaaccttggtttctacaaagctctagaaaaagaaggtattcagtcaaacaaaactaaagttggagatcgctatgttgtcgaggaaatgagaagaggaaattataatcttggtggtgaacaatccggtcatatcgtattaatggattacaatactactggtgatggattattaacgggtgttcagttggcttccgttattaaaatgagtggtaaaactctaagcgagttagcttctcaaatgaaaaagtatccacaatctttaattaatgtgagagtgactgacaaatatcgtgttgaagagaatattcatgttcaagagataatgacgaaagttgaaacagagatgaatggtgaaggaagaattcttgttcgtccttctggaactgaacctttagtacgtgtaatggttgaggctgcaactgacgcggatgctgaaagatatgctcaaagtatcgctgacgttgttgaagacaaaatgggtttagataaataa

SEQ ID NO: 9353 - DNA, 156 bp, Staphylococcus epidermidis; identical to SEQ ID NO: 2381

SEQ ID NO: 9354 - DNA, 1806 bp, Staphylococcus epidermidis; identical to SEQ ID NO: 2382

SEQ ID NO: 9355 - DNA, 858 bp, Staphylococcus epidermidis; identical to SEQ ID NO: 2383

SEQ ID NO: 9356 - DNA, 1005 bp, Staphylococcus epidermidis; identical to SEQ ID NO: 2384

SEQ ID NO: 9357 - DNA, 732 bp, Staphylococcus epidermidis; identical to SEQ ID NO: 2385

SEQ ID NO: 9358 - DNA, 954 bp, Staphylococcus epidermidis; identical to SEQ ID NO: 2386

SEQ ID NO: 9359 - DNA, 342 bp, Staphylococcus epidermidis; identical to SEQ ID NO: 2387

SEQ ID NO: 9360 - DNA, 657 bp, Staphylococcus epidermidis; identical to SEQ ID NO: 2388

SEQ ID NO: 9361 - DNA, 804 bp, Staphylococcus epidermidis
gtgattgaaaatggtatatttgctggtcaaacattggatcaagtatggaacaatcatagagaaatatttggagattttccaagtaaagattttccattaatggctaaaattgtagatgctgctgcgccattgtctattcatgtacatcccgacgattcttatgcatatgaacacgaagaaggtcaatatggaaaatctgaatgttggtacatcattgaagctgatgaaggtgcaaagattactataggtacgtatgcgaaatctcgtgatgaatttgaagagcaattggagcaaggtacatttgaaaattatttgagaacaatacaagtgcaaccaggtgatttttactttataccagctggaacgatacattccataggtgcaggcattatggcgtatgaagtcatgcaatcatcagatatttcatatagaatttatgattatcatagaaaaactgataatagtgaggaacgtgaattaaatatagataaggcattagatgttattaattattcaaatgaactacctaatatcactcctcaaaatgaagtgatagaaaatcacaattgtacacatattgtatctagtgatttttttactatggttaagtgggatatttctggtactctaaattatatgaagcctagagaattttgtcttgtttctgttttagatggacaaggtaaacttattgtagatggtgatatatatgatatatctaaaggttcaaactttgtgttaacttctgaagatttagatagtgttttcgaaggagattttaaactaatcattagttacatttaa

SEQ ID NO: 9362 - DNA, 228 bp, Staphylococcus epidermidis; identical to SEQ ID NO: 2390

SEQ ID NO: 9363 - DNA, 126 bp, Staphylococcus epidermidis
atgggtttcatcagtaatcactttaatgtgatcatcgttattattaaatattttcatttattttatcataatattatccactattctaaacaacacttatcattaaaggttgatttaaaaaattaa

SEQ ID NO: 9364 - DNA, 1377 bp, Staphylococcus epidermidis; identical to SEQ ID NO: 2391

SEQ ID NO: 9365 - DNA, 411 bp, Staphylococcus epidermidis; identical to SEQ ID NO: 2392

SEQ ID NO: 9366 - DNA, 447 bp, Staphylococcus epidermidis; identical to SEQ ID NO: 4830

SEQ ID NO: 9367 - DNA, 711 bp, Staphylococcus epidermidis; identical to SEQ ID NO: 2394

SEQ ID NO: 9368 - DNA, 666 bp, Staphylococcus epidermidis; identical to SEQ ID NO: 2395

SEQ ID NO: 9369 - DNA, 1302 bp, Staphylococcus epidermidis; identical to SEQ ID NO: 2396

SEQ ID NO: 9370 - DNA, 1194 bp, Staphylococcus epidermidis; identical to SEQ ID NO: 2397

SEQ ID NO: 9371 - DNA, 351 bp, Staphylococcus epidermidis; identical to SEQ ID NO: 4824

SEQ ID NO: 9372 - DNA, 471 bp, Staphylococcus epidermidis; identical to SEQ ID NO: 2399

SEQ ID NO: 9373 - DNA, 1185 bp, Staphylococcus epidermidis
atgcataataaacaaaagatattagattttatagaaaataataaatatgattatgtagaaataagtcatcgtattcatgaacgccctgaattaggcaatgaagaaatttttgcatcgagaacattaattgaccaattaagagcaaatcgattcgaaatcgaaacggatattgcaggacatgcaacaggatttatagcaacgtatgattctgatatgactggaccggttataggatttctagctgaatatgatgctttacctggtcttggtcacgcatgcgggcataatattattggtactgctagcgtacttgctgcagtagcactaaaagaagtcgtcgatgaaattggtggtaaagtagtcgttttgggatgtcctgctgaagaaggtggggaaaatggctccgcaaaagcttcttatgttaaagcaggtgtcattgatgaaattgatgtagcattgatgattcatcctggaaatgaaacctatcgtacaattaatactttagctgtggatgttctagatattaaattctatggacgtagtgcgcatgcatctgaaaatgcagatgaagcattaaacgctttagatgcaatgatttcatattttaatggtatagcacagttaaggcaacacattaaaaaaggacaacgagttcacggggttattttagacggtggtaaagcggctaatattatacctgattttacacatgcgagattttatactcgagctacttcacggaaagaacttgatgttttaactgaaaaagtaaaccaaattgcaagaggtgctgcgattcaaactgggtgtgattttgaatttggtcctatccagaatggtgtaaacgaatttatcaaagcgcctaaacttgatgatttatttgaaaaatatgcaactgaattaggagaagaagtgattgatgatgattttggttatggatctacagatacaggtaatgtaagtcatgttgtaccaactatacatccacatattaaaattggttctcgaaatcttgtaggacatacccaccgctttagagaatcggctgcaagtttacaaggtgatcaggcactcattcgaggtgcaaaaattttagcattaatgggactagaattaatcgaaaataaaccgttgttagacgaaataattgaagagcatacgcatataaaggggcatgttaagtaa

SEQ ID NO: 9374 - DNA, 1191 bp, Staphylococcus epidermidis
atgaataataaagtaaatggtccgtttctcacacttagtgatttgtataatgatgacattgtttacacatctcgaccttcatatgtgtcgaacccatggttgaaaccagatgaacaccaatcaaatttcttaactggaagagaattacttatagctaatcgttttcctgtcattgttcatgaggcaagtgttacaaacaaattagaacaactttttaatatagtgggtagggaaattccaccacatacttataaatttaaagatcaagaaacatatgaaagcttgataaggaatttagctcttcatcaaggtaaaaaaatctactttcaatatattcataatgaagatattttacctaaagaatattatgcacttgataaagatgtttttgttgctcttaataataaagcacgaattccagaatggactaataacaaatatctaccacaaagagaaattgtctcaattaaagattttgaatctcgtattcaagcatggtcgtatccatttgtcataaaaccaggcgatgatttacctacagcaggaggatatggtgttatgatttgttataatgatacagatttagataaagctatcacacgcatcaacaatgcatcagcagagactgaacatttaatcattgagcaaaaaattaatgcagtgaataactattgtgtacaatttgcttattcagatgatattggtatcaaatacttaggaacagcgcaacagttaactaatgactatggattttacaacggaaatgaaaatgttaatgatgtgcctcagaatgtaatagacgctggtagagagattatggaaataggcgtaagcaaaggtttttttggtgtagcaggttttgacttactagtagatgataataatgatgtttatgcgattgatttaaactttaggcaaaacggatcaacgagtatgctacttttagcaaaagatttaactcatggatatcataaattttacagttacttttctaatggagataatacaaaattctataatgctattttaaaatacgtagaattaggtgtactttatccactttcctattacgatggagattggtatggaaagaatcaagttaattctagatttggctgcatttggcatggggaaaataaagaattaattaatcaatatgaacaacaatttatattggaagctggattataa

SEQ ID NO: 9375 - DNA, 666 bp, Staphylococcus epidermidis; identical to SEQ ID NO: 4820

SEQ ID NO: 9376 - DNA, 798 bp, Staphylococcus epidermidis
atgaagattggaattgatgccggagggactttaattaaaattgtacaagagcatgacaatcgtagatattacagaactgaattaacaactaatatccaaaaagtcatagattggcttaacaatgaagaaatcgaaacattaaagcttacaggtggaaatgctggagtaatagcagatcaaattcatcattcccctgaaatatttgtagagttcgatgcatcatcaaaaggtttagaaattttattggatgaacaaggtcatcaaattgaacattacatttttgctaatgtaggtacaggtacttctttccactattttgatggaaaagaccagcaacgtgttggaggtgtaggtaccggaggcgggatgatacaaggtttaggctatttattgtccaatataacagattataaagaattaactaatttagctcaaaatggagatcgtgatgccattgatttaaaagtaaaacatatttataaagatactgaaccaccaattcctggagatttaacagcagcaaattttggaaatgtattacatcacttagataatcagtttacatcagctaacaaacttgcctctgcaattggagtcgttggtgaagttataacaactatggctattactttagcacgtgaatataagactaatcacgttgtatatatcggttcatcatttaataacaatcaattactacgtgaagttgttgaaaattacactgttctaagaggatttaaaccgtactatattgagaatggtgctttttcaggcgctttaggagcactttacctctaa

SEQ ID NO: 9377 - DNA, 861 bp, Staphylococcus epidermidis; identical to SEQ ID NO: 2404

SEQ ID NO: 9378 - DNA, 537 bp, Staphylococcus epidermidis; identical to SEQ ID NO: 2405

SEQ ID NO: 9379 - DNA, 1608 bp, Staphylococcus epidermidis; identical to SEQ ID NO: 2406

SEQ ID NO: 9380 - DNA, 522 bp, Staphylococcus epidermidis; identical to SEQ ID NO: 2407

SEQ ID NO: 9381 - DNA, 861 bp, Staphylococcus epidermidis; identical to SEQ ID NO: 2408

SEQ ID NO: 9382 - DNA, 1260 bp, Staphylococcus epidermidis
atggctcaagaggtaataaaaattagaggtggacaagcactaaaaggagaagtagaaattagtggagcaaaaaatagtgcagttgctattatccccgcaactttattagctcaaggacaagtaaagttggaaggccttcctcaaatctctgatgtcgaaactctagtaagtttgttagaagatttaaatattgaagcaagattaaatggtaaacaattagaagtggatactacacaaatagagaatgcacctctacctaataataaagttgagtctttacgtgcttcttattatatgatgggcgcaatgcttggtcgttttaaaaaatgtgtaattggattgccaggtggatgtccactcgggccaagacctattgatcaacatattaagggattcaaagcattaggagcagaaattgacgaatctagcaatacatccatgaaattagtagcaaaagaacttagaggcgctcatatatttttagatatggtaagtgttggagcgacgattaatattatgcttgcggcagtccatgccaaaggtcaaactgttattgataatgcagccaaagaacctgaagtcgtagatgttgcaaactttttaatgagtatgggtgctgatattagaggagcaggtacaacatcaataaaaatcaatggtgttgaggaactaaaaggttcagagtatcaaattattccggacagaattgaagctggttcttatatgtgtatggccgcagcaatgggtgaggaggtcattttacataatattgttcctaaacatgttgaagctttaactgttaagttgcaagagttaggtgtagatattgaaattgaagatgaaaaaataatcattcgtaaacaaacaccgtataaaaatgtagatataaaaacgcttgtttatccaggttttgcaactgatttacaacaacctattacaccattattattcatgacagaaggaccttcgtttgtgactgatactatttatccagcgcgttttaaacatgtagaagaattacagcgtatgggtgctaatattaaatcggatgagggaacagctgtgattaaaccttcgacacttaatggagctgaagtatatgcaagtgatttacgcgcaggcgcttgcttaattactgcaggtttaatagctgaaggtgtgacgacaatatttaatgtaaaacatatttatagaggatatactaacatcgttgaacatcttaaagcacttggtgctgatatttggacggaaacggtataa

SEQ ID NO: 9383 - DNA, 1428 bp, Staphylococcus epidermidis; identical to SEQ ID NO: 2410

SEQ ID NO: 9384 - DNA, 1317 bp, Staphylococcus epidermidis; identical to SEQ ID NO: 2411

SEQ ID NO: 9385 - DNA, 258 bp, Staphylococcus epidermidis; identical to SEQ ID NO: 2412

SEQ ID NO: 9386 - DNA, 600 bp, Staphylococcus epidermidis; identical to SEQ ID NO: 2413

SEQ ID NO: 9387 - DNA, 1077 bp, Staphylococcus epidermidis; identical to SEQ ID NO: 2414

SEQ ID NO: 9388 - DNA, 837 bp, Staphylococcus epidermidis; identical to SEQ ID NO: 2415

SEQ ID NO: 9389 - DNA, 1044 bp, Staphylococcus epidermidis; identical to SEQ ID NO: 2416

SEQ ID NO: 9390 - DNA, 420 bp, Staphylococcus epidermidis; identical to SEQ ID NO: 2417

SEQ ID NO: 9391 - DNA, 525 bp, Staphylococcus epidermidis; identical to SEQ ID NO: 2418

SEQ ID NO: 9392 - DNA, 1239 bp, Staphylococcus epidermidis; identical to SEQ ID NO: 2419

SEQ ID NO: 9393 - DNA, 630 bp, Staphylococcus epidermidis; identical to SEQ ID NO: 2420

SEQ ID NO: 9394 - DNA, 1146 bp, Staphylococcus epidermidis; identical to SEQ ID NO: 2421

SEQ ID NO: 9395 - DNA, 240 bp, Staphylococcus epidermidis; identical to SEQ ID NO: 2422

SEQ ID NO: 9396 - DNA, 729 bp, Staphylococcus epidermidis; identical to SEQ ID NO: 2423

SEQ ID NO: 9397 - DNA, 213 bp, Staphylococcus epidermidis; identical to SEQ ID NO: 2424

SEQ ID NO: 9398 - DNA, 516 bp, Staphylococcus epidermidis; identical to SEQ ID NO: 2425

SEQ ID NO: 9399 - DNA, 540 bp, Staphylococcus epidermidis; identical to SEQ ID NO: 2426

SEQ ID NO: 9400 - DNA, 1512 bp, Staphylococcus epidermidis; identical to SEQ ID NO: 2427

SEQ ID NO: 9401 - DNA, 867 bp, Staphylococcus epidermidis; identical to SEQ ID NO: 2428

SEQ ID NO: 9402 - DNA, 1413 bp, Staphylococcus epidermidis; identical to SEQ ID NO: 4793

SEQ ID NO: 9403 - DNA, 405 bp, Staphylococcus epidermidis; identical to SEQ ID NO: 2430

SEQ ID NO: 9404 - DNA, 1266 bp, Staphylococcus epidermidis
atggataaaatagtaataaatggtggaaatcgtttaacaggtgaagttaatgttgaaggagctaaaaatgctgtattacctgtacttacagcgtcattacttgcttctgaaggacacagtaaactagttaatgtcccagagttaagcgatgttgaaacaatcaataatgtattatctacactcaatgcaaatgtagagtatgataaagataaaaatgcagttaaagttgatgcaactaaaactttaaatgaagaagccccttatgaatatgtgagtaaaatgcgagcaagcatcttggttatgggaccactacttgctcgactagggcatgctattgttgctttgccaggaggatgtgcgattggaacacgtcctatcgagcagcacattaaaggatttgaagctttaggtgcagacattcatttagaaaatggaaatatttatgcaaatgctaaagatggattaaagggagcacatattcatttagattttccgagtgtaggtgcaactcaaaatattattatggcagcgtccttggcatcagggaaatctatcattgagaatgtcgctaaagaacctgaaattgttgatttagctaattatattaatgaaatgggcggtaaaattacaggtgcaggtactgataccattacgatacatggtgttgaaaaactttacggtgttgaacatgcaattataccagatagaattgaagctggaacgttacttatcgcaggtgcaataactcgtggtgacatatttgtacgtggtgcaattaaagaacatatggctagtttaatatataagcttgaagagatgggggtagatcttgaatattatgaagaaggtataagagttacagcaaatggagatttaaatccagtagatgtaaaaactttaccacacccaggtttcccaactgatatgcaatctcaaatgatggctttattattaacagcaaatggacacaaagtgattactgagactgtttttgaaaatagatttatgcacgttgcagaatttagaagaatgaatgcgaatataagtgttgaaggaagaagtgctaaaattgaaggaaaaagccatttacaaggtgctcaagttaaagcaacagatttaagagctgctgcagccttaatcttagctggtttagttgcagagggaactacgcaagtgactgagttaaagcatctagatagaggatacgtcaatttacatggaaaactaaaaagtctaggtgcaaacatagaacgtgtaaatcgataa

SEQ ID NO: 9405 - DNA, 438 bp, Staphylococcus epidermidis; identical to SEQ ID NO: 2432

SEQ ID NO: 9406 - DNA, 441 bp, Staphylococcus epidermidis; identical to SEQ ID NO: 2433

SEQ ID NO: 9407 - DNA, 396 bp, Staphylococcus epidermidis; identical to SEQ ID NO: 2434

SEQ ID NO: 9408 - DNA, 660 bp, Staphylococcus epidermidis; identical to SEQ ID NO: 2435

SEQ ID NO: 9409 - DNA, 690 bp, Staphylococcus epidermidis
atgacattttcaaaagagttgagggaagcatcaagacctattattgatgacatttacaatgatggttttattcaagatttactagcaggtaagttatctaatcaagctgtaagacaatacttaagagcagacgcttcttatttaaaagagtttacaaatatttatgcaattctcatacccaaaatgagttctatggaagatgttaaatttctagtagaacaaattgagtttatgttagaaggagaagttgaagcgcatgaggttctagctgatttcattaatgaaccatatgaagaaatagtaaaagaaaaagtatggccaccaagtggtgatcattatattaaacatatgtacttcaatgcatttgcacgtgaaaatgcagccttcacgattgcagcgatggcaccctgtccatacgtctacgctgtcattggtaaacgtgcgatggaagatcccaaattaaataaagaatcagtgacttctaaatggtttcaattttatagtactgaaatggacgaacttgttgatgtgttcgatcaattgatggaccgtttaactaaacattgtagtgagacagaaaaaaaagagattaaagaaaatttcttgcaaagtactattcatgagagacatttcttcaatatggcatatattaatgaaaaatgggaatatgggggaaataacaatgaataa

SEQ ID NO: 9410 - DNA, 822 bp, Staphylococcus epidermidis; identical to SEQ ID NO: 2437

SEQ ID NO: 9411 - DNA, 789 bp, Staphylococcus epidermidis; identical to SEQ ID NO: 2438

SEQ ID NO: 9412 - DNA, 642 bp, Staphylococcus epidermidis
atgatgtttgattcaaaacaattatcagtctattttatttgcggaacacaagatatacctaaaaataaatcaattgagcaagttctcaaagaggcattagaagctggaatcacgctatatcaatttcgtgaaaaaggtccgaatgcactaaaaggggaaaagaaaaaacagttagccttaaaacttaaacaattatgtcactcatatcacgtacctatgatagttaatgatgatgttcaattagcccaagagattaatgctgatggcattcatgtaggtcaagatgatatggaaattcaacaatttgcaagccaatttaaaaataagattataggtttaagtgttgggaatttgaaagagtatcaacaatctgatttgtctaaagttgattacattggagtaggtccaatgtatacaacatcatcaaaagatgacgctagtaaacctgttggtccatctatgatatctcaattaagattatatattcatgattttcctatagttgccattggaggtataaatgaaactaacgtgcagcctattgttgacgaaggtgcagaaggtatttctgtcatctcagctattacacgtagtaccaatatagacaaaacggttaaatatttcttaagatatttcacctaa

SEQ ID NO: 9413 - DNA, 873 bp, Staphylococcus epidermidis
atgaagaaaaaagcgttactacctttgtttttgggaataatgatttttctagcaggttgtgattactctacacctgagaagcaagatggattcttctttaatacttttgttcaacctatgaaacatctcttacagtggttaggaaatgatgtttttcataataattttggactagcaattattgtattagttcttttcattcgtttaatcttgttaccatttatgttatctaactataaaaatagtcacatgatgcgtgagaaaatgaaagtggctaaacctgaagtggatggcattcaagaaaaggttaaacgtgcgcgtacacaagaagaaaaaatggctgcaaaccaagaacttatggaagtttataaaaaatatgatatgaaccctatgaagagcatgttaggatgtttacctatacttattcaaatgccaattattatgggattatactttgtattaaaagataagcttgtaaatggtttatctgaacatccgcatttcttatggttcaatttaactaagcctgatatttggattacagttattgccggtgtgctatactttattcaagctgtagtttcaagcaaaacgatgcctcaagagcaacgtcagatgggctatatgatgatggttatttctccaataatgattatttggatttctttacaagcatcatcagctttaggtttatattggtctgtcagtgcattattcttagtaattcaaacgcattttgctaatgtttattactctaaacttgctaaaaaagaagttcaaccttttattgaaaagtatgaaagagaacataatccatcttcaaagaaaaaagggaaaaatactcaagtagtatcaaaaaagaataaaaaataa

SEQ ID NO: 9414 - DNA, 654 bp, Staphylococcus epidermidis
atgaactcaagaatgaagattaaaaaagcttatgagtatatgaaaagtttccatcaacatgatacaactggacatgatattgcacatgtggaacgtgtctataacaacgcttgttatatcgctaaacgagaaaatataacagatacacttgttatagaactatcatctttattgcatgatactgttgatagtaaattaactgatgaaattttagcatatgatcagcttaaacagttcttatctaccctagatttaagtagtgaaatatcacaacaagttctctatattattaaacatatgagttatcgagctggtaaaaataatcacgttaaactttcaatagatggtgaaatcgttagagatgctgatcgcctagatgccataggagcaatcggcattgcgagaacattccagttttcaggacactttggtgaacctatgtggactgaaacgaagctttcaaatgaagagttacatacgtctctcgttgaagaattagacaattcagcaataaaacatttttatgaaaaattatttaaattaaaagatttaatgcacacacctactgcaaaaaaacttgctgaagaaagacatcaatttatgattcaatatctcaaacaatttatgtcagagtggaattttaataaagagtaa

SEQ ID NO: 9415 - DNA, 1485 bp, Staphylococcus epidermidis
atgatagaagtctttactatggcacttcatcaatctaatattataattaatattttattagttagtgcctttttattaaatttagtttttgcattcattattattttcatggagaggcgtacagcaaattctatatgggcgtggttattggttttagtttttctacctttagtaggattcatattgtatttattattaggtcgccaaatacagagagaacatatatttaaactcgccaaagaggataaagttggtcttgaaatgattgttgacgagcaattagaggcattgaaaaagcaagacttttctaagggtaatcatcaaattgttaaatttaaagaaatggtacaaatgttactttataataatgctgcttttttaacaactgataatgatctaacaatttatacagatggtcatcagaagttcgatgatttaattaatgatattagacacgcacaatcatatattcacatccaatactacattattcatagtgataatctcggaaagcaattgttacatgaattagaaaaaaaagctgaagaaggtatagaagttaaaatgctatacgatgatatgggctcaagagatttacgaaagaaagatctaaaaaagtttcgtcaaaaaggcggtcacgctgaatctttctttccatcaaaattaccacttattaatttaagaatgaataatagaaaccacagaaaaatagtagtcattgacggtacgattggatatgttggtggttttaatgtaggagatgaatatataggtaaatctaagaaatttggttattggagggacacacacttacgtattaaaggtgacgcggtaaatgcccttcaacttagattcatcttagattggaactcacaatcaactcgtgacaatttaacttatgaatctcgatattttcctgatgttgactctggtggtacgataggcatacaaattgcttcaagtgggcctgatgaagattgggaacaaattaaatatggttatttaaaaatgatttcatcagccaaagaatctatatacattcaatcaccatacttcattcccgatcaagcttttttagattcgattaaaattgcagcgcttggtggtgtggatgttaacatcatggttcctaacaaacgtgatcatccctttgtttattgggctacgcttaaaaacgtagcgtctttacttgaagctggcgttaatgtctatcattatgataatggttttctacattcaaaaacacttgtcattgatgatgaggtagcaagtgtaggaactgccaatatggataatcgaagctttacattaaactttgaggtcaatgcttttatttatgatgaaggcgtagcacgatcattaaaacaagctttcattaatgatatgaaattatctaacaagctcacttctgaagaatatgctgaacgaaatatgctagttaaattcaaagaagggatttcacaactactttctccaattttataa

SEQ ID NO: 9416 - DNA, 294 bp, Staphylococcus epidermidis; identical to SEQ ID NO: 2443

SEQ ID NO: 9417 - DNA, 210 bp, Staphylococcus epidermidis; identical to SEQ ID NO: 2444

SEQ ID NO: 9418 - DNA, 138 bp, Staphylococcus epidermidis; identical to SEQ ID NO: 2445

SEQ ID NO: 9419 - DNA, 1212 bp, Staphylococcus epidermidis; identical to SEQ ID NO: 2446

SEQ ID NO: 9420 - DNA, 1074 bp, Staphylococcus epidermidis; identical to SEQ ID NO: 2447

SEQ ID NO: 9421 - DNA, 1356 bp, Staphylococcus epidermidis; identical to SEQ ID NO: 2448

SEQ ID NO: 9422 - DNA, 1530 bp, Staphylococcus epidermidis; identical to SEQ ID NO: 2449

SEQ ID NO: 9423 - DNA, 480 bp, Staphylococcus epidermidis; identical to SEQ ID NO: 2450

SEQ ID NO: 9424 - DNA, 1506 bp, Staphylococcus epidermidis
atgtatagtccgcaaaagctacatccaatttcttatattgatggcttgattagtgtgattaaatcaaatttcattgtaattatcatctttttatttaatataaaagattttaaatatgatgatttttcgtcttatattattccaggtataatgactttgatattttctatcggtttcattcataatattattaaggtttataatacacgatattggattgaagaggatcattttattttaactactggtgtttttaataaggaacgaaaagaactaaatattagtcgcatacaatctgcagatacgtctcaaggtttgattaatcaaattgttggcggcgttgaactcatcattaaaacaccaagtgatggcatagaattagggacaatttccaaaaagcaaagtgaagttattgaacaagaattgcgatctattcaagaacgcatgaataaccaggtaaatcaagaagctaaagagttaaatgatgagaatcatactcagacatatcaacaacatgccaaaccccaatatgcaatatttaaaatgccttttaaacaactattatttatgtctatgacaagtggagctatagcacttgcttttgtgacactatctcctattattggcagtctctcaagtgttattccatgggataaatttggtgaagaaatatcttcggtatttaaaacgatatatttcattgtcatttttattgtcatactagtgttattattaagttatataatcggaactatcatgtacttaataaagttttatggatatcaagttattcaagataatcatcaacttaaaattcaatatggattatttacaaagaaaaatatcactgtaccaactgaccgactgcaaggtgtacttgaacatcaatcttttatacgaaaattatttggttatacatctatacatttctatattacaagtgatatagatactactgaaggggaacccactgataatgatggaagaattatgattttaccgtttattccaagaaaagaggcatataaagtgattaggcctttggttcctgagatgacatttaatcatgctaaaattggcatgcctttaaaaggatttcatcgtcactttctaattccttccttatgtattattggtatgggcattattggatggtatatgtggtctttatggtctttaatcatagctttattaccaatcttattattttttgtttacgctatactttatacacgttttagtggttttgcttttagcgaatcagagctagttgtccaaaaagcgtctatattaaatattaagagattttatgttaaaaaagaaaaagttttaggaatggctattagccaacatccctttcttgaaagaagtcaactcgcaaattttcaatttgttattgctaagggtagtagtcagcaaaacattggtttgaagtttagtgaagtagataatgttcttaaactcaaaaattggtacatgaaaggtgatactcatgaagtcttataa

SEQ ID NO: 9425 - DNA, 510 bp, Staphylococcus epidermidis; identical to SEQ ID NO: 2452

SEQ ID NO: 9426 - DNA, 354 bp, Staphylococcus epidermidis; identical to SEQ ID NO: 2453

SEQ ID NO: 9427 - DNA, 1149 bp, Staphylococcus epidermidis
atgtcagagaagttttatagagcaacatatttaaatgtgaatttagatgcaattttagcaaattatcaaaatttcaatcaattacacgctaataagactgtcatttcagtcattaaagccaatggatatggattaggaagtgtgaaaatagcacaacatttaatgcgtcatggtgcaacattttttgcggtggctacacttgatgaagcaatagaattaagaatgcatggagttgatgctaaattattagttttaggtgttgttccaacagaagacattgagaaggctatacagcatcgtgttgctttaacagtaccttctaaagcatggttgaaggaaactatcaagcaaattcctgatgataaccaaaaaaatttatggctacatgtaaaattagatactggtatgggccgaattggaatgaaagatatagatgaatataaagaagtggttgatttaattaataaaagagatcatttagtttttgaaggagttttcacacattttgcgagtgcagatgaacctggaaattctatgaatgaacaatatactttgttcaaagagatggttaatcaagttgagaaaccaatctatattcattgtcaaaattctgctggatcactactcatggatggtcaattttgtaatgcaataagattaggaatctctctttatggatactatccttcagaatatgttaaagataatgtaaaagttcatttaagaccaagtgcgcagttagtatcagaaaccgttcaagttaaaacacttaaagctggtgaaactgttagttatggacgtacatatattgctgatgaagaaatgacaattgcaattttacctattgggtatgccgacggatatttaagatcgatgcaaggtgcgttcgtcaatgttaacgggagtcaatgtgaagtcattggacgtatttgtatggaccaattgatagttaaggttccttctcatgtaaaaacgggtgaaaaagtaatacttatggataatcacgttgattcaccacaatcagctgaagccgtagcaaataaacaaggtacaattaactacgaagtattatgtaatttatcaagacgtcttccaagaatatattattatgataataatgaagaggttactaacgaattgttaaaatag

SEQ ID NO: 9428 - DNA, 171 bp, Staphylococcus epidermidis; identical to SEQ ID NO: 2455

SEQ ID NO: 9429 - DNA, 363 bp, Staphylococcus epidermidis; identical to SEQ ID NO: 2456

SEQ ID NO: 9430 - DNA, 1002 bp, Staphylococcus epidermidis
gtggaagaattcacaaaaagttataaagcccttgttaaagaaagtttaataactaacaataaaacattattaattaagaaatgtgaagcattcacaaatgaagttataaagaaagatgttttacctgaagatatagttgagatacataaagattatattaatacattagatttaactgaagaagatatattagaaacactcgatgtgttacaagaagtcgttaaaggatttggatatagttaccgagattaccaaagacttgttaataagcttcaagtccacgataaagaaatggatttagcctcaagacttcaacaaactatgctgaaagctgatattccacaatttgatagcattcaaataggagtgatatctgttgctgcacaaaaagtaagtggtgattattttaatcttattgaccataaagatggcacaatgagttttgctgtggcagacgttataggttcaggcataccagcagctttagctatgagtatgataaaatttggcatggatgcttatggacattcacaactacctagtgatggtttgaagcgtttgaaccgtgttgttgaaaagaacgttaaccaaaatatgtttgtcacaatgttttatggactgtatgaagagatgaatcatcttctttactgtagctcagctgggcatgaacctggctatatatatcgcgcagaaactgaagcgtttgaggaaattggtgtgcgaggaagagttctaggtgtgagtcccaaaacacgttatagccaacaggaaatccctatttaccttgatgatttaatcataatttttactgatggtgttacagaggcacgagatgtagagggtaattttattgataaagataagttgttagacttaattcaaaaatataagcatatgcatccacaggatatagttcaaattatttacgaagcgattttaaaattacaaaatcctgcgagaaaagatgatatgactattttaattataaaaagagtaaactaa

SEQ ID NO: 9431 - DNA, 327 bp, Staphylococcus epidermidis
atgaatctaaatattgaaacaataactcatgatgatttttatgaggttaaagttggtggagaattggacgtatatactgtacctgaattagaagaggtactagtaccaatgagacaagaaggcacacatgatgttcacgttaacttagctaatgtgagctatatggattcaacaggcctcggtttattcgtaggcacgctaaaagcattaaatcaaaatgataaaaatctctatatcttaggtgtttcagagcggataggtagattgtttgatattacaggtttaaaagatttaatgcatgttaatgaaggaacggaggtagaataa

SEQ ID NO: 9432 - DNA, 480 bp, Staphylococcus epidermidis
atgcaatctacacaagattatattgaaatgcggttgccagcttctgcagaatacgtaagtttaatacgtttgacgctttcaggggtattttcaagagctggcgcatcttacgatgatatagaggattctaaaatagcagtgagtgaagcggtgacaaatgcggttaaacatgcatataaaaaaaattctgaaataggcatgattaatctttgttttgaaatatttgatgatagaattaaaatcgttatttcagaccaaggtgaaagttttgattatgaagccacaaaatcacatttaggtccatataatgataatgaaaatattgattttctacgtgaaggtggtctaggattatttttaattgagtctttaatggatgaagttactgtttataaagaatctggtgtaacaatcagtatgattaagtatataaaaaaagagcaggtgcgaaataatggcgaaagagtcgaaatcagctag

SEQ ID NO: 9433 - DNA, 771 bp, Staphylococcus epidermidis
atggcgaaagagtcgaaatcagctagtgaagtatcacctgaacaaattaaccaatggattaaacaacatcaagaaaacgaagatagccaagctcaagataaattagtaaaacattatcgtaagctgattgaatctttagcttataggtactctaagggacaatcacatcatgaagatttagttcaagttggtatggttggtctaataggtgctattaatagatttgatttatcatttgatcgtaagtttgaagccttcttagtaccaacagttattggtgagattaaaagatatttacgagataaaacatggagtgttcatgtacctagacgtattaaagaaattggtccaagaatcaaaaaagttagtgatgaattaacaaatgaacttgaacgttcaccatctattagtgaaatcgcacaacgcttagaagtttcagatgaagaagttttggaagcgatggagatggggcagagttacaatgccctgagtgtggatcactctatagaagcagataaagatggttcgacagttacattattagatattatgggacaacaagatgataattatgatttaacggaaaaacgtatgatattagaacgtattttacctattttgtcagagagagaaagacaaatcatacaatgtacttttattgaaggtcttagccaaaaagagactggtgaaagaattggtcttagtcaaatgcatgtttcacgtttgcaacgtaccgcaataaaaaaattacaagaagctgcaagacagtaa

SEQ ID NO: 9434 - DNA, 2151 bp, Staphylococcus epidermidis
atggataacagtttaattgaaacaattgtaagtaaatatcaattttcggaaaaacaaattaaagcagttttaaaattgctgaaagaaaacaatacggttccatttatagcaagatatcgtaaagaagctacaggtggacttgatgaagtagaaattaaacaaatcaatgatgaatataactatatgttaaatcttcaaaaacgtaaagaagaagtaatacataatattgatcaacagggtctattaacttctgatttaaagcaagacatattaacacagacgaagctacaaagagttgaagatttatatcgtccatataaacaaaaaaagaaaacacgtgcaactgaggctaaaagaaaaggattagaagatttagcagattggttttcacaatcaaaattggatacaaaaattgaagataaagctcaattattcttaaatgatgaagtgactacaattgaagatgcgatagaaggggctaaagatattatagctgaacgtatttcggataatcctcaatatcgctctaaaatacttaaagatgtttttaatcagggactaattgtttcctcgaaaaagaaaaaagccgaagatgagaaacaaacattttctatgtactatgattacaaggaaccaattaaacgtattgctaatcatcgtgttttagcgatgaatcgaggagaaaaagaaaaagtattatcaataaaaattgattttgacacgacacgtattcaaagagaaatagcaaatgttgagataaaaactcaaaatgaagcaactccgtttattaaagaggctattcaggatagccttaagcgattaattcttccttcaatagaaagagaaattagaggagatttaacacaaaatgcagaatctcatgcaatagatgtattcagtgaaaatcttagaaatttattactacaaccaccaatgaaaggtaaacaaattcttggagtagatccagcatttagaacagggtgcaaacttgctgtcgtcaatccatttggtacctttattgctaaaggtgttatttatcctcatcctccaatatcaaaagttgaggcagccgaaaaagagctggtaaagatgataagtgactataatattgagcttttagcgattggtaacggtactgcgagtagagaaactgaacaatttgttgctcaagtaataaaaaaatatcaacttcaagctcaatttatcatagtcaatgaagctggcgcatcagtttattcagcatcagaaattgctagacaagaatttccagattttcaagtagaagaacgaagtgcagtttcaattggtagaagagttcaggatcctttaagcgaacttgttaaaatagatcctaaatctataggagtaggacagtaccaacatgatgtcaaccaaaaagatttaagtagtgccttaacgtttgtagtagagactgccgtcaatcaagttggtgtggatgtgaatactgcttctaaatccttgttacaatatgtatcaggtcttacatcaactatcgctcaaaatattattgattataaggaagaaaacggacctataaaacatcataaagaaataagtagaattaaacgattaggtgcaaaaacatttgagcaaagtattggttttttaagaattgttgatggtgaagaacctttagataatactgcaatacaccctgaaagttacgatgttgcatatcgcatgcttcatcaattagatttaactgcacaagatataggttccgttaaactcaaaaacacgttatcaaatgttaatatttcaacacttgtatctcaattaaatattggtgaacctacattaaaagatataatacaatcattgattgcacctaatagagatccaagagatgaatttgaaacacctattttgaagtccgatgtattatcgattgaagatttatctaaaggcatgaagttgaatggtacagtaagaaatgttgttgactttggagcatttgtagatatcggtgttaaacaagacggactagtacacatatcaaaattatctaagaaattcgttaaaaatccaatggatatgataagtgtaggagatattgtagaagtttggattttagatataaatgaaaataaaggcaaagtttcattgactatggttgccccaaatgaataa

SEQ ID NO: 9435 - DNA, 456 bp, Staphylococcus epidermidis
atgaataatttagcattacaaagccttaccgaaagtatagcgataaagtattttggcaaagcttttaagcacgaggtatattataataaacgtttacgtaccactggcggtagatatatattaagtagtcataatatagaaataaatccaaaacagtatgaaatgtttggagaaaaagcagtcattgatatcataaaacatgaactgtgtcattattttcttcatttagctggtgaaggatatcaacatcgtgataaagcattcaagagtttgagcgccaaagtaggagcacctaggttttgtactccgacagaatcttatcaagatagagctaattataaatataggtgcatctattgtgaacaagaatttattcgtataaagcgtgtgaatcttgaaaaaatgcgttgtggacgatgtggaggtattttaaaacttcttcaaacaagaaagtga

SEQ ID NO: 9436 - DNA, 135 bp, Staphylococcus capitis; identical to SEQ ID NO: 736
  CDS (1)..(135)

SEQ ID NO: 9437 - protein, 44 aa, Staphylococcus capitis
MTKLAEAIANTVKAGQDHDWAKLGTSIVGIAENGIGLLGKVFGF

SEQ ID NO: 9438 - DNA, 135 bp, Staphylococcus capitis; identical to SEQ ID NO: 737
  CDS (1)..(135)

SEQ ID NO: 9439 - protein, 44 aa, Staphylococcus capitis
MTKLAEAIANTVKAGQDHDWAKLGTSIVGIAENGIGALSKIFGG

SEQ ID NO: 9440 - DNA, 135 bp, Staphylococcus capitis; identical to SEQ ID NO: 738
  CDS (1)..(135)

SEQ ID NO: 9441 - protein, 44 aa, Staphylococcus capitis
MQKLAEAIANTVKAGQDHDWAKLGTSIVGIAENGINAITKIFGG

SEQ ID NO: 9442 - DNA, 135 bp, Staphylococcus capitis; identical to SEQ ID NO: 739
  CDS (1)..(135)

SEQ ID NO: 9443 - protein, 44 aa, Staphylococcus capitis
MTKLAEAIANAVKAGQDQDWAKLGTSIVGIAENGISLLGKVFGF

SEQ ID NO: 9444 - DNA, 135 bp, Staphylococcus capitis; identical to SEQ ID NO: 740
  CDS (1)..(135)

SEQ ID NO: 9445 - protein, 44 aa, Staphylococcus capitis
MQKLAEAIANTVKAGQDHDWTKLGTSIVDIVENGVSALTKVFGG

SEQ ID NO: 9446 - DNA, 135 bp, Staphylococcus capitis; identical to SEQ ID NO: 741
  CDS (1)..(135)

SEQ ID NO: 9447 - protein, 44 aa, Staphylococcus capitis
MEKLFDAIRNTVDAGINQDWTKLGTSIVDIVDNGVKVISKFIGA

SEQ ID NO: 9448 - DNA, 132 bp, Staphylococcus epidermidis; identical to SEQ ID NO: 2970
  CDS (1)..(132)

SEQ ID NO: 9449 - protein, 43 aa, Staphylococcus epidermidis
MKLFNAFKDILEAAITNDGTQLGASIVNIIEGSVDMVNRFLGN

SEQ ID NO: 9450 - DNA, 135 bp, Staphylococcus epidermidis; identical to SEQ ID NO: 2971
  CDS (1)..(135)

SEQ ID NO: 9451 - protein, 44 aa, Staphylococcus epidermidis
MEQLFDAIRSVVDAGINQDWSQLASGIAGIVENGVSIISKLLGQ

SEQ ID NO: 9452 - DNA, 135 bp, Staphylococcus epidermidis; identical to SEQ ID NO: 2973
  CDS (1)..(135)

SEQ ID NO: 9453 - protein, 44 aa, Staphylococcus epidermidis
MSKLAEAIANTVKAAQDQDWTKLGTSIVDIVESGVSVLGKIFGF

SEQ ID NO: 9454 - DNA, 78 bp, Staphylococcus epidermidis
  CDS (1)..(78)
atggcagcagatatcatttctacaatcggtgatttagtaaaatggattatcgatacagttaataaattcaaaaaataa

SEQ ID NO: 9455 - protein, 25 aa, Staphylococcus epidermidis
MAADIISTIGDLVKWIIDTVNKFKK
